United States Patent Application Publication US 2022/0031776 A1 - sequence listing, part 10

SEQ ID NO: 286 - DNA, 5036250 bp, Klebsiella pneumoniae (residues 1,678,751-3,357,500 of 5,036,250)
  modified_base (1574679)..(1574680): a, c, t, g, unknown or other
  modified_base (2310703)..(2310706): a, c, t, g, unknown or other
  modified_base (2442940)..(2442990): a, c, t, g, unknown or other
  modified_base (2446776)..(2446851): a, c, t, g, unknown or other
  modified_base (2536439)..(2536458): a, c, t, g, unknown or other
  modified_base (2536910)..(2536911): a, c, t, g, unknown or other
  modified_base (3046635)..(3046636): a, c, t, g, unknown or other
  modified_base (3047105)..(3047200): a, c, t, g, unknown or other
  modified_base (3047482)..(3047497): a, c, t, g, unknown or other
  modified_base (3805884)..(3805906): a, c, t, g, unknown or other
gctgatgaccccggggatggcgatttcggtgtggctgataccggtatggattgccgttctcggcgttggctatctgtttaagcagaaaagcgccggcgtcgtaaaagcacaataatacatctcgtcacgccgtgtccgtcctcgagcgacgggcacggcgcattgttatctgcttcacactttccttcctgtaacagttttatccatatcgatgacggattactgcaacgtaattcccgacgctaagaccaataattctctccagactgcaatggagagttccaggatgacaggcaataaactttcgctgaaagaaaagattggctacgggatgggcgatgccggatgtaacattatctttggcgccatcatgttgttcgttaactatttttatacggatatttttggtcttgcaccggcgctggttggggtgctgctgctttcggtgcgcgtcatcgatgctgtcaccgacccgatcatgggggcgatggccgaccgcactcgcagtaaatatggccgctttcgcccatggctgctgtggatggccttcccctacgccctgttcagcgtgctgatgttcaccaccccggaatggacctacaacagcaaggttatctatgccttcatcacctacttcctgctgtcgataacctataccgcgattaacatcccctactgctctttgggaacggtgatgacatccgacccgcaagagcgggtagcctgccagtcataccgctttgtgctggtcggtatcgcgacgcttctgctctcgttgaccctgttgccaatggcggagtggttcggcggcgccgataaagcgaaaggttatcaaatggcgatgaccgtattagcgttcatcggcatgtgtatgtttttattctgcttcgccaccgtacgcgagcgcatccgcccggcggtacaaaccaacgacgagctgaaaaaagacctcaaagacgtgtggaaaaacgaccagtgggttcgcattttgctcttaaccctgtgcaacgtttgccccggctttatccgcatggccgccaccatgtactatgtcacctgggtgatggggcaaagtacccacttcgccaccctgtttatcagccttggcgttgtcggcatgatgatcggcagcatgctggcgaaagtgctgaccgaccgctggtgtaaactgcaggtctttttctggaccaacattgtactggcggtcttctcctgcgcgttctacttctttaatccgcatgccacaacgctgattctggtgctctacttcctgctcaatatcctgcatcaaatcccgtcgccgctgcactggtcgctgatgtccgacgtcgatgactacggcgagtggaaaaccggtaaacggatcaccggcatcagcttctccggcaatctcttcttcctgaaagttgggctggcggtcgccggggctatggtgggtttcctgctgtcgtggtacggctacgatgccggcgcgaagcaacaaagcgcctcggcgctaaatggtatcgtgctgctgttctctgtgatccccggagttggctacctgattaccgcaggcgtcgtgcgcctgctgaaagttgaccgtaatctgatgcgccaaatccagagcgatctggaaaaacgccgcagtaattacagcgaactgaatgaattccaggaattgaaaaccagtgaacacataaggaaagcctgatgaacaactggcctaaccctttattgaacaacgcgcggacccttttatcctgcgccatcacgaccaatactattttattgcctccgtgccggaatacgatcggctggagattcgccgcgccgccacgctggaaggcctgcgtgaagccgagccggtgaccgtctggcgcaaaccgcaaagcggtccgatgagccagctgatttgggcaccggagctccactacatcgacggcaagtggtatatctatttcgccgccgccccgacccatgatctcgacgcccaggggatgttccagcaccggatgttcgcccttgagtgtaccgacagcgatccgctcagcggccgttggcaggaaaaagggcaaattatcaccccgttcgataccttcgccctcgacgccaccaccttctgccatcaagggaaacgctggtatttatgggcgcagaaagacccgcagatcgccggcaataccaatctctatctggcggagctggaaaacccgtggacgctaaaaggcacgccgatcatgctgagtaagccggagtttgcctgggaatgccggggatttatggtcaatgaggggcctgcggtgctggtacacggcgataagttgttcatcagttattccgccagcgcgaccgatgaaaactactgcatgggattattatggatcgatcgtgaagccaacccgctgttgcctgaaaactggcacaaagcccgcagccggtatttcgcaccagctatgaaaaccgccagtatggtcccggccataatagctttacgcaaacgccggagggggaagatgtgctggtgtaccacgcgcgcaactacaccgaaatcgaaggcgacccactgtacgatcctaaccgtcacacccggctaaagctggtgcgctggcaagaaaacgggatgcccgacttcggcatcccgcccgctgatacgctgtagcgagtcaatcctcgcccggcgagcgctgcgctgggcggattttgtcgctacggttataggacagtaggccggataagcgcagcgccatcaggcaacatggggccacaggcgagtacgtcttacccagcaacgcctggcttcgggccgttaaatcaaagtcccgtagatggtcagcagcgccataatcaccaccaccaccagcgaggttttcttcgccatggaaaccgccgcttttggcgtctcaaccgcatcgacgtgcggctcgcgggccaacgagaactgggccagacgagttaatacctgatactgtgaagagtgacggtcgcctagcgaggcaaaccacgccggcagcgctttttcgccgtgccccagcagcgcgtataccacaccaaccaggcgcaccggcacccaatcgacaatatgcagaataccgtcaatgccggactgtaaacgatggcgcggcgtctgatagcgcgcaagccaggtctgccaggcgcgcaggacgctataagcggttagcgtcagcagcccccaatgcccccgaccaccaaccagaacagcggcgcgagatagtagcgatagttaatccataacagcgcgttttgcagctcgcgaagatactcctgacgatcgcagcccggcggcacgccgtgaataagcgttagctcgctggccatagagtcgcaggcgtggctatcgttgttcgccgccgccttcagataggcatgataatgcaggcgcaccttacccgcgccaatacacagcaggccaagcaaaatccagaacaccagcagcggtacgttaaatagctgcccctgtagcaggcgttgaataacatataccaccgccaccgcgacgacggtcatcagcacggtgccgaacagcgagaaatgcttcacgcggcggaacagtacctccaggcgatgatcgagctgccagtgctcgccaagcttgaacagacgctcggcgatgagaaccagcagcgtagtaaacaacgtcatggtatctccttatgtgacgatgcggccaacataccgcggtattttgcccaatcaaaggccgggccgggatccgttttacgtaccggcgcgatatcgcaatggccggtaatattatcagcaataccaggataacgctggatgagcgcccgggtaatcactactagctgctggtactgcgcctcggtgtaggcctgagtatccgtcccttccagctcaatgccgatcgaaaaatcattgcagcgctcgcggccgtgatagctggagacgcccgcatgccatgcgcgcttatcaaagggtacatactggactatctcgccatcgcggcgaatcagacaatgcgccgaaacgcgcagatgagcaatcccggcgaagtaaggatgcgcgtcggcatccaatgtaccggtaaatagcgcgtcaatccacgggccgccaaactcccccggcggcaggctgatattatgtaccaccagtaaagaagggttttcatcgtccgggcggcaatcgtgatgcggcgaaggcacccgacgcgcgcccaccagccatccgccattcaactgcatggggaatctcctttcgcaaacgtggatcccggcggccccacaggcgacgcgaaatccattgggtatgtgtggtacagaaacgtggttcaggttagcatgtttcccacttctgaatcttatctatctggagctttatcatgacgcctcgtcgctacagccccgaccgccgccgtgacgcgctgctggaacgtattaatctcgatattaccgacgccgtcgcgcaatcactacgcgaagatctgggcggcgaagttgacgctaacaacgatattagcgcgcaattattgccatcggacgcgcgctcccacgccgtcgttatcacccgcgaagatggggtattctgcggcaagcgttgggtagaagaagttttcattcagcttgccggcgacgatgtcagcatcacctggcacgtggctgacggcgatacggtaaaagccgatcaaccgctgttcgaactggacgggccgtcgcgggtgctgctgaccggcgaacgcaccgcgctgaatttcgtgcagaccctctccggggtagcaagcgaagtacaccgctacgtcgacctgctcaaaggcaccaaaacgcaactgcttgatacgcgtaaaacgttaccaggcctgcgcaccgcgttgaagtatgcggtgctgtgcggcggcggcgcgaaccaccgtctgggcctcttcgacgctttcctgatcaaagaaaaccatatcatcgcctctggttcggtacgtcaggcggtggaaaaagccttctggctgcacccggacgtaccggtggaagtcgaagtcgaaacgctggatgagctggatgaagcgttaaaagccggcgctgatatcatcatgctcgacaatttcaccaccgacctgatgcgcgaggcggtgaaacgtaccaacggccaggcggcgctggaagtctccggcaacgttaccttcgataccattcgcgaattcgcggaaaccggcgttgactatatttccgtcggcgcactcactaagcacgtacgggccctcgacctgtccatgcgttttcgttaattctctccccgatatccaccgggtatcggggttatttttgcgagacgcctcgcacgcttcacgtacatatttgaaagtgctaccgaaaagctggatacctgcatcctaagcgtatttttcctcctcgccgccgcgacgtaatcgcgccaaagtcaccccacaaccaacaaggagtgacttatggataagcaacgtggttttaccctgatcgaattaatggtggttatcggcattatcgccatcctcagcgccatcggcatccctgcctaccaaaactacctacgcaaagccgccctcaccgatatgctgcaaacctttgtgccctaccgcacggcaatagagctgtgcgcgttggaccacggcggactaaccagctgcgatggcggcagcaacggtatcccttcaccgtcgactacccgctatgtatcggcgatgagcgtcgcccaggggtggtcaccctgaccggccaggagagccttaacgggctggccgtcaccctgaccccttcatgggataacgccaacggtatcaccggctggcagcgcgtctgcgccatcggcgatgacagcgcgttaaagcaggcctgcgaagatgtcttccgctttaactgaggtgacagcaatgaatactgaacagctactctcactctgtcagcgccatcacgcactgttgttgaggagcgacgagcagaccattgttatcgccgtcgtggatacgccggcgccagatctaatggaagcgctgcgcttcgctacccaaaagcgcatcgatattgaatgctggagccaggagcgaatggataagcgtcagaatgaggcgcaacgggcagcagcagagcctgccacgggtaatacccagggcgtaaccgatctactgaatcaaattctggagcaggctctgcgccagcgtgcctctgatatccatattgagccagcggaaaatcagctgcggatacgcctgcgtgtcgatggcgtgttacatgccctaccgttacttgaggccgcgctggctgcgccaatggccgcccggcttaaggtgctgggcagcctcgatattgccgagcatcgtctaccgcaggatggacagttcactctgacgcttgccgggcgcacggtctcctttcgcatcgcaaccctcccctgccgcggcggggagaaaatcgtcctgcgtttattacaccaggtggagcaggcgctggatctggaagctctgggactctcctctcgtcagctggcttttttccgcgccgcattgaaccagccgcaggggttgctactggttaccgggccgacaggtagcggcaaaaccgtcaccctgtacagcgcgctgcaggcgcgaaaccgcgaagaggttaatatctgcagcgtggaagatccgctggagatcccgcttaccgggctcaaccaaacgcagatcaacccgcgatccgggcttaccttccagagcgtcctgcgggcgctgctgcgtcaggatccggatatcgtcatggtcggagaaattcgcgatgccgaaaccgcggaaatcgccattaaggccgcgcaaaccgggcatctggtgctctctacattgcatactaactccaccagcgaaacgttaattcgcctgcaacaaatgggcgtagcgcgctggatgatctcctcggcgctatcgctggtggtcgcccagcggctggtgcgaaaactgtgccccactgccggcgcgatggcggccgacctaccgaggtgccgcacagtctttggccacgtccattgcccggctggctggcggttggctgcccacagtgctaccacggttactacggccgcctggccttattcgaactgctgccggtggatagcgcgctacgtcaggccattcaacgcgatcttagcgcggcggaaatcgaaacgctggcccgcgaagctggcatgatgacgctgtttgaaagcggttgtgaagcggtggagcgcgggttgaccagcctggaagaagttgtgcgggttttggggatcccacatggcgactaagcagctttggcagtggcgcgggatggataagcaaggaatgccgtgcgagggcaccctgtggcaagaaacgcgtgggcaggcgctggcatcactggaacagcagcagatattgctactgacgctgcggcgccaaacggtacaggggtcactgtggcgtccgcgctatagcagcgagattatccgccagctagccacgctgctgcaggctggtttaccgctggccgaagggcttgagctgctggcccaacaacagccgcacaaacagtggcaggcgttgctacgagtgctggcgcaggaactggcaaatggcgtttctctctccagcggcctggcgcaatggccgcaggtcttccctccgctctatctggcgatgatccgcaccggcgagctcaccggtaagctggagcgctgctgctttcaactcgcgcaacagcagcaggaacaacagcgtctgacagaaaaggtaaagaaagcgctgcgctatccgatcgttatcctgacattagcgctagcgctggtcgtggcgatgctgtttttcgttctgccggaatttaccgccatctatcggaccttcaacacgccgctccccttgctgacgcaaatggtcattcaccttggcgacgcgttagcccgctactggcccttgctgccgcctctttttactattccactatttatcaaccggctggcccggcgtcgcccacgctggctgctgttaaggcaaagattatttcacgcgattccaatagcgggtcggctgatcaacggtcagcaactgagccagatatttaccattctttcactgacccaaagcgcgggtatcagctttatacaggggctggagagcgtcgaggaaaccgtgggctgcccgctgtggcggcagcggattgcacaggcgcgtgcagatattatccacggccaaccaatctggcaggcgctgacgaattgtggcggatttacctcgctgtgcctgcagctcattcgtatcggcgaggcatctggagcgctggatacgatgctcgataacctggcgcgccatcatagcgagcaaactcatcaacaggcggataatctggcgacgctgctggagccaatactgctggtggtgaccggaacgatcgtcggtgtgctggtggtagcgatgtacctacctgtttttcatctgggggacgcgctgggcacaatggagagttaatggctggcgccagagcgccagccatcgtcattacaggctgttgaacacgcggttctcttgttcctgtacgcggataaaggttgtacgtttggtcagctctttcaggcgggaagcgccaacataggtacaggccgaacgcaggccgccgaggatatcgcgcgcggtattatcaaccgggccgcgcagcggcagcttaacggttttaccttccgcggcacgatatttcgcgacgccgccgacgtggcgagtcatcgccgattcagagctcataccgtaaaacagcatgaatttttcaccgttctcttcaaccacggtaccgccgctctcttcgtgacccgccagcataccgccaagcatgacaaaatcggcgccgccgccaaaagctttcgcaacatcgcccggcatggtgcagccgccgtcgctgatgatctggccgccgagaccgtgcgcggcatcggcacattcaatcaccgcagacagctgcgggtagccaacgccggttttcacgcgggtagtacagacggagccagggccaatgcccactttaacgatatcagcgccggagagaatcagttcttcacacatttcaccggtcaccacgttgccggcgataatggttttttgtggccaggcggcgcgcgctttcgccacaaactgaacgaagtgttcagagtagccgttagccacgtctatgcagacgaagttcagctgtggattttgggtcaggatctgctgagttttttcaaagtccgcgtcagaggtaccggtggacaccatcacatgttgcagcacctctgcggattcgctctgcacaaacgcctgccattcttcaacactgtagtgtttgtgcacggcggtcagaattccaaaagcggacagggctttcgccatgctgaaggtgccgacagtatccatgttagcagcgataatcggtacgccggaccaggtctggcctgaatgcttaaaggtgaattcacgttccagctgaacatcagaacggcttttgagggtagagcgtttcgggcggataagaacgtctttaaaacctagcttcagatcttcttcaatacgcatgtgcgaattcctggggttaattgcattaatgtgagagcacaactccagtgacgctatcatacgcacgaatcatagccgcgcaagactgcgattttcactttttttacgctacaatcgttaaaatttacctggcgaatagcgaaaaacacgttcgtgtgctttccttaccattgcgtcatttttaaccaattgttttttatatataaagtgaatcacaattcacattgtggatactttttcgatttaacaaaatcttgattaagctatcctctgggtctgaatggcgcggtgaatcgccagggttttgaacaataatgtgacatcgggattgaagtgtatggggtatacggtagcgttaacaggcggcatcggtagcggtaaaagtaccgttgccgacgaatttgctcacctgggcgtaaccgtcatcgatgccgatattattgcgcgtcaggttgtagagcccggtacaccagccctgctcgccatcgctgaaaaatttggtccgcagatgatcaacgacgatggcagcctgaatcgccgccgcttacgtgaacgcattttcgctcatagcgaggacaaagcctggcttaacgcgctgttgcatccgttgattcagcaagaaacacgccgtcagatgcaggcctcaacctcaccttatctcctctgggtcgtacccttgctggtcgaaaaccgcctgaccgataaagccgatcgcgtactggttgtcgatgtgccgaaagagacgcaaatcgagcgcaccatacgccgcgatggggtcagtcgtgaacacgctgaacatattcttgccgcccaggcgacgcgcgaacagcgtcttgccgcagcggatgatgttattgaaaacatgggctccgcggatgccgtcgcatcccacgtcgcccgcctgcacgataagtatttaatgctggcatcgcaggccgcctcacaggaaaaaccgtaatgcatacccctgttctcttcgaacatccgctcaatgagaaaatgcgcacctggctgcgcattgaatttttaattcagcagctctcttctcgcccaaccatcgccagctacgcggacgctctccattttttccgcaataccggcgatctactggacgtgctggaacgtggcgaagtgcgtaccgatctgctgaaagagctggagcgacaacagcggaaattacaaacctgggccgaagtgcccggtgtcgaccagcagcgtattgaagccctacgtcagcagctcaaactgtccggcagcaccctgatctccgctccacgcattggccagtttctgcgtgaagatcggctgattggcctggtgcgccagcgtctgagcatccctggcggctgctgcggctttgatttgccaacgctgcatatctggctgcatatgccgcaagagtatcgcgatgagcaggtggcaaaatggttagcgagcctgacgccgctgatgcagtcgctggagctgatccttgatttgattcgtaactccgcgcctttccgtaagcagaccagcctcaatggtttttatcaggataatggcgacgatgccgatctgctgcgcctgcgcctggatctcgcaaaccagctgtacccgcaaatttccggccataaaagccgcttcgccatccgcttcctgccgctggacagcgagcatggtatcgtgccggaacgctttgattttgaactggcttgttgctaaggagacactatgtcagaagagactatcgttaactgcccaacctgcggtaaaaacgtcgtctggagcgaacaaagcccgtttcgtccgttttgctcgaagcgctgtcagctgatcgatctcggcgagtgggcggcggaagagaaacgtatacccagttccggcgacttatccgacagcgatgactggagcgagccgcagcagtaaccttccctattgctaatccgggacaatccggattagcgtttcaggcctgcgccgggttgcccggcgctcaggcaagcgtaataagtttattaattatcggctcgttcgccggcggaaatgcctgcggatccaacgcctgctgcgccatccactgccccggttgtccttctttgccccacggctcgccttgccagttttccaccaggaagaaccatagcgtgatatggcggtcagggaattgatactccagtttgtcgaacaacgtggacgtcgtcaccgtaatcccgacctcttcctgcagttcacgtaccagcgcttgttccggcgtctcacctgattctattttgccgccggggaattccagtttattagccatatgcgcgtctgcggcacgctgggtaataaaaatttcgccttgcggattgcgaattatcccgacggcgatttgcagttttttcattgaatcagctccataaaaaaggcgcagaaatctgcgccttggttttctttttatcagcccttagctcagacggccgtggcactgtttgtattttttaccggaaccgcacgggcacggatcgttacgcccaactttacgatcgccggtctgttctgccagcgaggcggcagccagagtatcgtcatcctgatggctcagctgctgcatctgcgcgagacgctccgcctcttcgcgacgttgctgttccatctcttcgacctcttccggcatccgcacctgtaccttgctcagcgtgctgatgacttcatacttcagcgattcgagcatagcggcaaacatcgagaaggattcgcgcttgtactcctgcttcggatctttctgcgcgtagccgcgcagatggataccctggcgcaggtagtccatcgccgccaggtgctctttccacagggaatccagcgtttgcagcatgacgcctttctcgaagtgtcgcatcatttcggcgccgaccacttcttctttacgctgataggtttctaccgcgctctgcagaatacgttcacgcagggtctcttcgtgcagctccggctctttatccagccactctttgattggcagctcaaggtcgaagtcgtttttcagacgttcctgcaggccttcaatatcccacatttcttccagcgactgcggcggaatatgcgcatcaatcgtggctttgaagacgtcttcgcggatgctgttgatggtttcgctcacgtcggagatatccagcagctcgttacgctgggtatagatagcgcgacgctgatcgttggcgacgtcatcatattccagcagctgtttacgaatgtcgaagttgcggctttccactttacgctgggcgttggcaatcgctttggtcacccaagggtgctcgatagcttcgcccggcttcatccccagtttacgcatcatgccggatacgcgatcggaggcgaagatacgcatcagagcatcttccatcgacagatagaagcgggaagaaccggcatcaccctgacggccagcacggccacgcagctggttatcgatacgacgggattcatgacgctcggtaccgatgatgtgcagaccacctgcggccagaaccgcatcgtggcgcacctgccagtcagctttgattttttcaatctgctccggcgttggattttccagcgcggcgacttctgcctgccagctaccgccgagcataatatcggtaccacggcccgccatgttggtggcgatggttaccgcagccggataacccgcctgggcgacgatatccgcttcgctggcgtggaacttggcgttcaggacgttgtgcttgatgccagctttcgtcagttcgcgggaaaccacttcagatttttcgattgagatagtaccgaccagcaccggctgaccggcagcggtacgatctttaatatcctcgataatcgcctgaattttttccgcttcggtcatgtagaccagatccgccatatccttacggatcatcggacggttagtcgggacgacaacggtatccagtttatagatggagctgaattcaaaggcttcggtatccgcggtaccggtcatccccgccagcttctcgtacagacggaagtagttctggaaggtgatggatgccagagtctggttctcgttctggatctccacgccttctttggcttctaccgcctggtggagaccatcggaccagcgacgcccctgcatcgtacggccagtgtgttcatcgacgatgatgacttcgccatctttcacaatgtagtcaacgtcgcgggtaaaaagcgcgtgggcgcgcagcgcggcggtgacgtggtgcatcagcatgatattggtcggagaatacagcgattcaccttcctccatgatgccttcctgcaccagcagctcttcaataagtaccagaccgcgttcggtcaggttaacctggcgagctttctcatctacggagaagtggccttcaccggtaaaggtgtcggagtcttccttttcctggcggatcaggtgcggaataattttgttcaccttgcgatacatttcggagctgtcttcagccgggccggaaatgatcaacggagtacgcgcttcgtcgatcaggatggagtccacctcatccaccagcgcatagtgcagtttacgctgtacgcgctcttccgggctgaacgccatgttatcgcgcagatagtcgaagccgtattcgttgttggtaccgtaggtgatgtcggccgcataggcttcacgcttcgccggcgcaggcaggccggacatattgatgcccacgctcataccgaggaattcgaacaacggacggttgttttcggcgtcacgttgcgccagatagtcgttgacggtaacgacgtgaacgcctttaccggtcagcgcgttaaggtacgccggtaacgtcgcggtcagggttttaccttcaccggtacgcatttccgcgatgcagcggtcgttcagtaccataccgcccagcagctgcacgtcgaaatggcgcataccgaagacgcgtttactcgcctcacgcaccacggcaaatgcttccgggatcaggctttccaggctttcacctttctccagacgcgcgcggaattctccggttttggctttcagctcgtcatcagagagcttttccatcgccggttccataccattgatgatgttgacgactttgcgcatacgacgcagcgtacggtcgttacggctaccgaacactttagttaacattttaattagcataataaaatctcaaacgccccgcggtgcggagtcaaaaaaaataggatggtccgtgtttattttcagctgagacgttgaggccctgcgcggatccccgctacctggcttatccaggcgctgacgcggaaggcagaataagaagaagggatataaaccgtctggcggataaccaccggcggtttgctgtcctgggtcagcagcgcgctgagcgtatcgagcagggccagatgctgggcctgcagcggcgatgattcttccgccaccggcaaagcctgcggcgccatcgcaaacgacagatggcgaatgacggtgcgaatcgcatgctgatgccagtagtcgacggtaaagttcggccgacgattggcctccagcaacgccaactgggagaagttaactttattcggattatgattgctggccgtggctttcgccggcgcagtggtttcgtggctgttgttaagcgcaggcaggccgaggctagccgcgaccatccccaacaggagatgcggccaaaaataccgtctgccaaactgtcgccaacgcgtcagcaatccactcactttctttacctttagttggtattcctgcgtcctttcaggcggtccattttattggcggtcttcgcagtacagcctgaaatcgacaggataaagcaacccagagaaaaattttgcgcccaaatactaacattaataccgcgccgagacagcaggaatgaacgctaatgctgcgggaaaacgcttaataaagcagcgaacgcgcacaggttattgccagcgaaacacagtgaaaagcggtttggggaggctaaaaagaaaaacgactggttccctggacggagagagtaccaggttaccagtcgaatttactgaatggtcaggcttacgccagaaccattgacggtgcgcggaatgccagcggcagttttgcgtcgtcttcgaaggtcacatactcccaggcttcctgttttgccagaacagcctgtagcagtttgttatttaacgcgtgaccggatttgaacgccgtgaatgcaccgataatgttgtgaccacacataaacaggtcaccgatcgcatccagcattttgtggcgaacaaattcatcttcaaagcgcagaccgtcttcgttcagtacgcgataatcgtcaacaacgatggcacaatcgaagctgccgcccaggcacaggccacgggactgcagatattcgatatcacgcatgaaaccgaaagtacgagcacggctaatctgacgcatgaacgcatcggccgagaagttcagcgcatagcgttgggtactggagtcgatcgccggatggttaaaatcgatggtaaagtccaacgaaaaaccattgtacggcttaaactcagcccatttgtcgccatcttcaacgcgaaccgtctctttgatacgcacaaatttcttggcgctgttcagttcatcgatgccggcatccagcaacagataaacgaacggagcggcgctaccgtccataatcgggatttccggcgcatcgacttcaacaataatgttgtcgatgcccaagccagccagtgcggcatttaagtgctcgactgtagaaatccgcacgtcatgctcgttcaccaggcaagtacagagcatggtatcacgcacagatttggcatcagccggaaaatcaaccggtggattcaagtcggtgcgacgatagatgaccccggtatttgccggcgcagggcgtaaagtcagcgtgactttcttgccggtatgcaaaccgacaccagtcgcctgaacaatacgtttaagagtcctttgtttgatcatcgtataatctcgccaagttacctatccaaccgaagtgtactatacattcggcagggcagtttagcacaaagagcgcagatgcccaacttccagccaattcttaatcagcttgcttacgcaggaaagctggaatatccagataatccggctctttcgcggtttgcggcgtattgtcgttcaccactttcgccaccggtttctgctcttgcgttaatggagccataccgtgctgctggtagcgatccattaccggctgctgtacctgtttgttggtcaccagggtaatttccggacgcttgtccataccgataccggtagcaacaacggttacgcgcagctcgtcgttcatatccgggtccagagaggtaccgataaccacggtcgcgttatccgaagcaaaggcgcggatagtgttaccaacggtttcgaactcatccagacgcaggtcgaagccagcggtgatgttgaccagaacgccgcgcgcgccggacagatcgatatcttccagcagcggagaagagatagccatttcagccgcttcttccgcacggtcttcaccgctcgccacgccggagcccatcatcgcgtagcccatttccgacatcacggtacggacgtccgcgaagtcgacgttcatcagacccggacgggtaatcagttcggcaataccctgcaccgcgcctttcagtacgtcgtttgccgcgccgaaagcgtcgagcagagagataccgcggcccagtactttcaacagcttgtcgttcgggatggtgatcagtgagtcaacgtgcttggacagctcggtgatcccctgctcagcaaacgccatgcgcttcttgccttcgaaattaaatggcttagtgacgaccgcaacggtcaggatacccagatccttcgccacttccgcgaccactggcgccgcaccggtaccggtaccgccgcccatacccgccgcgataaagaccatgtccgcgccatcaagcgcagcgcgcagcgcttcacggtcttcgtcagccgcattacggcccacttccgggttcgcgcctgcacccagacctttggtaataccgctaccgatctggatagtctggccaacagccgttttacgcagcgcctgcgcatcggtgttcaccgcgaagaattcaacaccctcaatgcgctcgcgcaccatgtgttcaacggcattaccgccgccgccaccgacgccgatgactttaatcaccgcgtcgttggtcagttccataggttcaaacatagtttctctccgtcttgtgcctgtcgcctgagaacgctaattgtctgcgttctcttaaaaaattaaaactcttttcgcagccagctgttgagtcgcttaatccacgagcccactgacgccgtcacgcgtttttctacttctgcttcaccactgagatgtgactcttttccgtagtgcagcagcccaaccgccgtcgaatagtacggctcctgagcgtaatccgttaaaccggtgatgttcagcggcgcgccaatgcgcacctgcgtatggaacacgcgctgcgcgcaggccgccaggccttcaatttgcgcggcgccgccggttaatacaatccccgccgccagatggtgtttgaccccttgctgacggagctgttcctgcagctgcaggatttcttcgttaaccagattgagcagttcggtataacgcggttcaatcacctctgccagcgtctgacgctgcaggctacgcggcggacgtccgcccacgctcggtacttccacgttttcgtctttaccgacgattgaacctaatgcgcaaccgtgacgaaccttgatggcttcggcgtcgctcggcggcgtaccgaaggcataggcgatatcgctggtcaccacgttgcccgcgtaagggatcactttggtgtgacgcagcgcgccgccggtatacacggcgatatccattgtaccaccgccgatgtccactacgcagacacccagctcacgttcgtcttccgttaatacggaataactggccgctaaaccggcgaaaataagttggtcaactttcagaccacaacgttcaaccgctttaacaatgtttttcgccatatcgttatggcaggtaatcagatgtaccttcgcctgcatacgcacgccggataaccctaccggatttttaataccttcctggtagtcgatggcgtattcctgcgggatgacgtgcagtacgcgatgttcgtcgcgtacgcgtaccgatttcgcggtatgaacgacgttctcaacgtcatcctgcgtcacctcttcttcggagataggcaccatgccaatctcattttgacagctaatatgcttacctgaaagcgccagatacactgatgagatctggcaatcggccattagttcagcctggtcgatagcgcgctgtacgcatttcactaccgactcgaggtcattcaccccgcctttatccatgccgcgcgatgggcaactgcccacgccaatgatattaatcataccgtcgggcagaacttcccctactaaagcggcaaccttcgcggtgccaatctccagtccaactaccagttttctgtccgtcgccttgatcatcgttgttctgcctgtgcctgattctgttgttgattattttcctctacgggagcaggtacccaacctaccgccgcacccgagtcatagcgcaaatcaacgtagcttatccgtttgccgtcggtctgtgcctgctgctgaagaaccgggtagagttccataaagcgctgaagccgtttcatggtgtcgccacggccaaggttgagcttaatatcgttattaagcgtcaactgccatgagcgacgcgcggtcattgccgccactttcaacgtgaacttattctttgccagcacctgtcccatgtcgcggtatccctgcagcacttcattttcgctgccttcagggccgtataacatcggtaagttctgtttgctggtacgatccgccggcacgctgaaagaatttccttcgacgtctaccatatgttgatcattccagcgcgcaatcggcacatattcaaccagatgaatcttcaattcatcgggccattgttttcttacgctcgcctgtttaatccatggcaggcgctcaatttggctctggatgatgttgacatcctgagtcataaaggtgcccggcgagcccaacgccagaatagcctgacggatatcatcgttacgcgtgtagtgacgttcgccggtgacgaccattttcgacaacggcagacgctgcgcatcttccatccaaccaagaaccatccatccgctgaccaacacggtacacaacaccgccagcaggaaaacgatccctgccagccgggttccattattccgacgcgaagaagcaatcgattcttcttcctggttccgcgtattcagcgccgcctgcgacatatcaccccgccaggtccagaattcgtacaacaagctgcgagaagctcatacccgcctgacgggccgccatcggcaccagactatggctggtcatccccggtgaggtgttcgcttccagcagataaaactggccatcgctgtccagcatcacgtcaatacgtccccatcctttgcaacccagaacattccaggctttaagcaccaggctctggatttctgactcgcgggcgggttcctcaaaaccagggcagaaatattgcgtctcatcagagagatacttcgcctcataatcatagaaggttccagccgcctggatacgaattgacggtaaaatttcttcaccgacgatagcgacggtaaattcggggccactgagccatttctcaatcagaacttcatcatcatgctgaaaagccagcgccaatgcatcctgcattgcacaactttcgctaactttcgacatgccgacgctggacccctcgcggctcggcttgatgataaccggcagccccagcgccgcaatctgctcagaaacgccagcagaaagtcctgcgttgaactgcgcgcgggtcaatgcaacccacggcgcgaccggtaatcccgcccctgccacagtaatttgctacgcagcttatccatagaaatagcggaagccattacgccgctgccggtgtacggcagttgaatgagctccagaaggccttgcagcgtgccatcttcgccgccgcgcccgtgcagagcaataaacgctttcttaaagcccatgtttttcaactgggtgatatcaacgtcacgcggatcgaccgggtgggcatccaccccgccttcacgcagcccggccaacaccgccgcgccagaattcagcgagacttcacgttcagcggaggttccgccgaagagaaccgcgattttatcagccatgtcggtcctcctccgttttttgcggtaccagtttgatttcagccaggtggcgtgcgatttttcctatgttgccggcgccctgtaccagcaccagatcgtcgccggtcaataccgatgccagcatctccgcggcctgcgccggatcggaaaccagaatcgggtcaactttgccacgaccgcggatcgtgcggcacagcgagcggctatcggcgccagggatcggcgcttcgcccgccggatacacatccagcatcagcagcgcatcaacctgggtcagcacgttggcgaaatcatcgtacagatcgcgagtacgggtataacggtgcggctggaataccatcaccagatttttatccggccagccggcacgcgccgctttgatagtggcgtcaacttccgtcgggtgatgaccgtaatcgtcaattagcatcgcgctaccgctcttgccgttgacttccgccagcggatattcgccaaggaagtcaaagcggcggccggtgccctggaaactttccagcgcgcgcagaatcgcctcatcttcaatgccctcttccgtcgcgacggcaacggccgcggcagcgttgagcgcattgtggcgacccggcgcgttcagcgtcacctgcatgagatctttatcctggcgtaccaggcggaaatggccctgcgcgccaatttggcgataatcttcaatgcgtacgtcggcgtcatcgctaaaaccgtaggtggttacctggcggccgacacgcggcagcagttcacgaatcaccgggtcatccacgcacatcaccgcgcgtccgtagaacggcaggttgtgcaggaagttaataaaggtctgcttcagattctcgaagtcgccatggtaagtatccatatgatcggcttcgatgttggtcacaatggcgaccatcggctgtagatgcaggaacgacgcatcgctctcatctgcttccgcaatcaggtagcggctatggccaagacgggcatgtacgcccgccgccttcaccaacccgccgttgacgaaggtcggatcgaggccggcctcggcgtaaatgctggataccatcgcggtggtcgtggttttgccgtgagtaccggcaatcgcaattccgtgacgaaaacgcatgagttccgccagcatttccgcgcggcggatcaccggaatgcgcgcttcgtgcgcggcgacgatctccgggttatccgaggagatcgcgctggacaccacgacgacgctggcatcgcgcacgttttccgggcgatggttaaaataaatagtggcgccaagctgcgacaattgctgagtcaccggattcggcgcgagatcggagccgctaatctggtagccttcattcgccaacacttcggcaataccgcccataccggcaccgccgatgccgacaaagtgaatgtgccggacgcgacgcatctcgggcactatggaacgcagttttgccaaatcttgtgtattcattctttacgccatcaacttctttattcgggcggtgaaaatcaccgcgattagcgcgccaaagctacggcgctgacctcttccgctacccgctcggtagcatccggaatcgaagcgccacgcgctcgttccgccatatccatcagggtttcccgatcccagccggccagggtagccgccacagcatccgccgtgaactcgggttgttcgagaattttcgccgcgccggctttttccagcggcagcgcattccagtactgctgacgatctttgtgctggaacgggacgaacaatgccggtaaacctgcggcggcgatttcgctgaccgtcagcgcgccggaacgacaaacaaccacatcggcccaggcataggctgccgccatatcatcaataaactcagtcactttatgctgcggctgaccggcggcggcgtacgcctggcacacggtatccatgccgccttttccgctctgatgccagatagtcaccgcatcgccaagtttcgcggccacctgcggcatagtctggttcagcacgcgcgcaccttgggagccgcctaccaccagcacgcgaatcggcccctgccgccccaccagacgctgtcctggcagcggtagcgcgagaacgtctgtacgcaccggattcccgacgacatctgcgtgcgggaaggcgccgggaaacgcctgcatcacttttttcgcaatcttcgccagccatttattggtcaggccggcaataccgttttgttcatgcagcactacagggatcccgagcgaccatgccgccagaccgccaggtccggaaacataaccgcccatgcccagcaccacatccggctggaaacgcttcatgatcgcccgcgcctgccgccaggcgttgaaaatacgcaccggtgctaacagttgcgcttttagccctttgccacgcaggccggagatacggataaaatcgatatcaatgccgtgtttcggcactaaatccgcttccatacgatcggcggtgccaagccagcgaacctgccagccctggtccattaaatggtgcgcgaccgccagccccgggaacacgtgtccgccagtaccgcccgccatcaccattaaccgcttttcctgaccgctcatcgaacaccccgtgtaaacgcctgcgctttctcgaggcgcgtttcataatctattcgcaataaaaacataatggccgtcgacataatcagcagactggaaccaccataactaatcaacggcagggtcagacctttggtcggcagcatccccgccgccgccccgacgttaaccaacgcctggaagctaaaccacacgccgattgcacaggccaggaagccggagaagcggtggtcaatctccagcgctttgcggccaatcgacatggcgcgaaaggcgacgaagaataccattaaaagcgcgagtaccacaccgatataaccgagttcttcgccgataatggcgaagatgaagtcggtgtgcgcttccggcaaatactccagtttctgcaccgagttgccgaggccctgccccacatctcgccgcggccaaaggccatcagcgattgggtcagctgatagccgctgccaaacgggtcttcccacgggttccagaaggaggtgacgcggcgaatacgatacggttcggcgaggatcagcagcaccaccgccgagattcccatgccgataatggcgataaactgccagagcttcgcaccggccaggaacaacatcgccaacgtagtgacgaacaacacaaccaccgtaccgaggtcaggctgcgccagcagcagaatcgccagtacaaaaatcacgcccatcggctttaagaagccgcgcaggttgttacgcacctcatccgctttacgcaccagatagttggcgatgtagcagaacagcgacagtttggtgaactccgccggctgaatacgcagcggcccgagcgcgatccaacgcgaggcgccgttaactgagctccccaccaccagtacgatcagcagcatcacaatcgaggcgatcagcatcgcggtactgtggcgctgccagaactccatcggcaagcgcagcgtaatcatcgccagcgcgaaggccagcacaatgtacagaccatcacgcttagcaaacaggaacggatcgttcgccagacgctgtccgaccggcattgatgccgaggtcaccatgataaaaccgatcgccgccaggccgaaggtcaaccacagcagcatccggtcatacatgaccaggctatcgttatctttcgggcgcgagcccatcacccaacctttcagcgcggcgaacagccaggcaaaaataaacatccccggcagtcgcggcagcttcaaccggggcagacccagctgcggcattttcaggcgtgggagagagaatcgcatcaacctaactccttcgccagacgggtaaagacatcgcccgttgttcaaagtttttaaactggtccaggctcgcgcaggctggcgacagtaagaccatatcgcctgatttgacctgcgaagcgatctgccgcatcgcctgttccatggtttcggtttgtaccgcgatttccggacgcagcgccgccagttgagcgccgtcgcgtccgaagcagtacagacgaacgttatcgccgccaagatagcgtttcagcggcgtgaagtcggcggatttaccgtcgccgcccaacagcagatacagcgtgccgtcgagatgcaggccgttcagcgccgcctcggtactgccgacgttggtcgcctttgagtcattgacccaacgcacgccgttatgctccagcgccagttggaaacggtgcgccaggccggtgaaggtggtgagcgccttcaagctactagcgcgcggcaagcccgcagcatccgccagcgccagcgccgccagggcattactgtagttgtgctggccgctgatagtcatttctttcacattcagcactttctcacccttcacccgcagccaggtttcgccctgctgacggttaaggtgatagtcgccaacatcgacgccgaagctgacgcagcgttcgtcagcgccgcgtaccggcatggtcagcgcgtcatcggcattcaccacgcaggttttagcattttcatagacccgcagtttcgccgcgcggtactgctgcagccccagcggatagcggtccatatgatcctcagtcacgttgaggatggttgccgcgacggctttcaggctggaggtggtctccagctggaagctggaaagttcaagcacgtacagttcacgcgccggatccagcagcatcagcgccggcaggccgatattgccgccaacgccgacattcacgcccgccgccttcgccatctcgcccaccagggtagtgacggtgctttttccgttagagccggtaatggcgataatcggcgcctgcgcctcgcggcaaaacagctcaatatcgccgacgatttctacgccggcatccgccgccgcgctcagtgaagggtgcgccagggcgatcccgggactagcgacaatcagatccgccgccagcagccagtcgtcgttaaggccgcccacgtggcgctcaacggcttccggcagcttatcaagcccggctggggcgacgcgggtatccatcacgcgtggggttacgccgcgcgccatgaaaaagtccacgcatgacaggccggtcatgcccagcccaataatgacgacttttttaccctgataatctgccatgattaacgtaccttcagcgtcgccaggccaatcagcaccagcatcagcgaaataatccagaagcgcacgataacgcgcggttccggccagcctttcagttcatagtggtggtgaatcggcgccatacggaagatgcgctggccgcgcagcttgaacgaaccgacctgcaggatcaccgacagggtttccacgacgaaaacgccgcccataatcaccagcaggaattcctgacgcagcagtacggcgataatgcccagcgcgccgccgagcgccagcgaaccaacgtcacccataaagacctgcgccgggtaggtattgaaccacaggaaacccaggccggcgccgacaatcgccgtacagacgataaccagttcaccggcgtgacgcagataaggaatgtgcaaatagttggcgaagttcatgttaccggtagcccacgccaccagcgcaaagccagcggcgacgaagacggtcggcataatcgccaggccgtcgaggccgtcggtcaggttgaccgcattgccggtaccgacgatgacgaagtaagccagcaggatgtaaaacagccccagctgcggcatcacgtccttaaagaatggcactaccagctcggtcgctggggtgtctttccccgccagatacagcgcgaacgctacgcccagcgcaatcaccgacatccagaaatacttccagcgggcaatcaggcccttggtgtctttgcgcacgactttacggtaatcatcgacaaacccgatgataccgtagccgatcaataccgtcagcacgcaccagacgtacgggttggacggataggcccacagcaggacggaaacggtaatcgcggtgaggatcatgatcccgcccatggtcggggtcccgcgtttgctgaagtgggactccgggccgtcgttacgaacaacctgaccgaaggacagtttttgcagacgggcgatcatgcgcgggcccatccacagagagatgaacagcgcggtcagcaggctgacgatggcgcgaaacgtcagataggaaaagacgttaaagccggaataatatttgaccagatgttcggccagccatactaacatgtcgcaatctcctgtaatgcgcgtactacctcttccatagcggcactacgtgaacccttcactaaaatggtcatgattttatgctctgccagcagctcgcgcaggcgagctaccacggcggctttatcgttaaaatgttcgcccacgccgctggcgctgctgatatccgcgctcagggaaccgacgctgaggacgcaatccagccccgccgctttcgccgcttcgccaacttcgcgatgacacgccgcgctttccgcgccgagttcagccatatcgccgactaccatcgcccggaagcccggcatttccgccagtacctgtaccgcggcggtcatcgaaccgacgttggcgttgtaggagtcatccagcagcagctgatttgcggcaagctgaatagggaacaaacgtcccggtaccgctttcagctgcgccagtccagctttcaccgcggcaagatcggcgccgaccgccatggccagcgatgtcgccgccagcgcgttagcgatgttatggcgccccggcagcggcagcagtacgtcgacattcccgaacggagtttgcagcgtaaattcggtaccatgactagtgatatgaacgttggtcgccgtgaagtcgctgtttgccgcgttcggcgagaagcgccacactttgcgatcgccgatcacgctctgccagttcagccagtcgttattgtcggcattcaaaatcgcggtgccgttttgcggcaggccggtaaagatttcgcccttcgctttcgccacgcccgccagcgagccgaacccttcaaggtgcgcggcggcgaggttgttgaccagtgccgcttccggacgcgtcaggctgacggtccaggctatttcgccctgatggttagcgccgagttcaatcaccgcatactggtgatctttgttcagacgcagcagcgtcatcggaaccccgatatcgttgttcagattaccggcggtatacagcgtgttgccgcactggctgaggatcgccgcggtcatctctttaaccgaggtcttaccggacgaaccggtgagcgcaacgacgcgggtcggcgcctgctgacgcacccaggccgctaactcgccaaaagccagacgggtatctttcaccaccacctgcggtaaatcgcaggccagcgggcggctaaccagcagcgcgcctgcgcccgccgctttcgcttgttcggcaaaatcatgcgcgtcgaatcgctcgcccttcagcgccacaaacaggcaacctgccgtgactttgcgggtatcggacgtcacgtcatcgatagcgatatcgcgaccctgcagttcgccgcgggtgatatcggcgagctggcttaatgtaaagcgaatcatgctaccgctcccagcagacgcgcgacggtaacgcggtcggaataatccagacggcggttaccgacgatctgatagtcttcgtggcctttgcccgctaccagcacaacgtcgttcgctttcgcctgcatcaccgcgctggtcaccgcttccgcgcggccttccatcaccttcacctgcccggcatcaagcatgccagccagaatgtcgttgataatcgcccgcggctcttcggtacgcgggttatcgtcagtcacgaccacgatatcggcaaactcttccgcgatagcgcccatcaacgggcgtttacctttgtcgcggtcgccgccgcaaccaaagacgcaccacagcttgccgctgcagtgcaaacgcgcggcctgcagcgctttttccaacgcgtcaggcgtatgggcgtaatcgaccaccacggtcggtttgcccggcgcgctgaacacttccatacggccgcacaccggctgtaaacgcgaagaggttttcagcaggtccgccagcggatagcccagcgccagcagcgtcgccagcgccagcagcaggttgctgacgttaaaggcgcccatcaggcggctttcgatttcgcctttgccccagctcgagtcaaactgaatggtcgcgccgctgtcgtgatagttgaccgcggtcgccttcagccagcggccgtggcagttcggattgatatgatcttccatcgacaccgccaccgcatccggcagtttcgccagccagcgacgcccgacttcatcgtcagcgttgacaatggcctggccgcaatggtgggtggaatacagcagccatttcgccgcttcgtaatgttccatgtcgccatggtagtcgaggtggtcacggctcaggttggtaaacaccgaggcggcaaactgcagcgccgccacgcgatgctgaaccagcccgtgagaagagacttccatcgcgccgaaagtcgccccctgccctaccaggccggaaagcacgtgctgaacatcgaccgcagagccggtggtgttttcggtcggcaccactttatccagcagaccattaccgacggtacccatcaccgcgctggtttcgccgagcagttttgcccactgcgccaacagctgcgtagtcgtagttttaccattagtaccggtgacgcccaccagacgcatctgctgcgaaggttgatgataaaaacgcccggccagcgcggataaccgctcgttcagttggctcaggtagatgaccggcacgccgtgcatctcgcgaacttcaccgtctgcggcctcgccctgcgcctcagcaataatggcagcaacaccttgcgctatcgcctgcgggatataacgacgcccgtccgcctgatgaccctgtaccgcgacaaagaggtcgccggacgccgccacgcggctgtccagcgtcatctctcgcagaattcgctccggcgcatttggcacccacggagcgagaaggtcgcgcaaattacgatctgccacctgttccctcgccttgattaatcacaaattcacttttttcgcccgttgccagcgcatccggttcgatgttcatggtgcgcagtacgccgcccatgatggcaccgaacaccggcgcggaaacggcgccaccgtagtatttacctgcctgcgggtcgttgatcaccaccaccagcgcgaaacgcggatgactggcgggcgcaacgcctgcggtgtaagcaatatatttgttgatgtagcggccatccggccccacttttttcgccgtaccggttttaatcgcgatgcgatagcctttgatcgccgctttcacgccgccgccgccgggcagcgccacgctttccatcatatgaacgacggtacgaaccagtgattccgggaacacgcgttcgcccggaaccggtggatcaactttggtaatcgacagcgggcgatagatgccgtagctgccaatcgttgcgtagactcgcgctaactgtaacggtgttaccattagcccgtagccgaaagaaaaggtggccctctctatgtcagaccaccgttgtttttgaggatataagccactgcgttctccgaccaaccccaaattggtcgcctttccaagcccaaaacgtgagtaagtatctactaacgctgaggacggcatcgctaacgccagcttagaaacgccgacgttactcgacttctgtagcaccccggtcagggtcaattcgctgtagcgcgccacgtctttgatttcgtggccgttaattcgatatggaatggtattcagcacggtattttcattgacgatgccgcgctgcagcgccgtcattaccaccatgggtttcaccgttgaacccggttcgaacacgtcggtgatagcgcggttacgcatggtgtctttcgccgtgccggcgaagttgttcgggttgtaggacgggctgttggccatcgccagcacttcgccggtgttaacgtccactaacactgcgctccccgattccgctttgttaaaggcaaccgcgttattgagttcacgatacaccaaggcctgcaggcgctcgtcgatgctcagcgcgaggttatgcgccgcctggctgtcggtggaagaaatgtcttcaatcacgcggccatagcggtctttacgcacgatacgttcgcccggctggccggtcagccacttatcaaaacttttctcaaccccttcaatcccctggctatcgacgttggtaaagccaatgaggtgagcggttacttcccctgacggatagtaacggcgagactcttcacgcagatgaatccccggcagcttcagttttttgatgtagtcagccatgtcagggttcacctgacgcgccagatagataaaacgcatccgcgggttgctgttgatgcgcgatgccagctggtccagcggcatattcagcgcatcggctaacgctttccagcggttatcaagcgtcacgccgcccgcgtcatgcaactctttcgggtcggcccaaatggcttttaccggcacgctgaccgccagcgggcggccggatcggtcggtaatcatgccacgtgcggttgacacttcctgcacacgcagggaacgcatatctccctgacgcaccagcatgtccgggctcaccacctgcagccacgcgacgcggccaagcaggaaggcgagagcgattaaaatacatccgcacagcaacgcaaaacgccaactaataaagttggcctgttcttcctgacgttttgcttttggcgttttcggcgctgctttcatgcgtcgcaataatccttatttctgtactactatattttcttgtgatggatcaacgtgttgcatctgcaacttctctgtcgcgatccgctcaacccgactgtgatcgccaagggcgttctcttcgaggatcaggttgcgccattcaatatccagagcgtcacgctccagaaccaattgttcacgctgcgcggttaacagacgggtatggtgcgccgtcgtcaccacggtcactgccgttatgatgatgcaaatgaacaggcagagtggcagcttcccaaaccgcagaagatcatccccgataacgccaggcaaggcatggcgctcgttgcttcctaacgatcctttaactttgcttaaggctactgtcactctgccgatcatgcgttcgtcctctctgcgatacgcagcactgaactacgggcgcgtggattctctgccacctcttcttcgcccggcatcaacttgcctagtgctcgcaactgacggccacccagtttcctgagctgctcttcagtcatcgggatccccgctggaacctgcggaccgcgactttgttcacgcataaagcgcttcacaatacggtcttccagcgaatggaaactgataatcgacagccggccaccgggggccagcacgccgagcgagctttttagcgcctgctctatctcctccagttcactgttcacccagatgcgcaccgcctggaaggtacgggtcgcgggatgtttgtgcttatctttcaccggcgttgccgccgcgataacttccgccagctctttagtacgggtcatcggctcaatgcggttacgttcaacgatcgcgcgcgcaatacgtttgccgaaacgctcctcgccaaaggttttgattacccaggcgatgtcggcttcttcggcggtctgtaaccattcggcggcggactgaccgcgagtaggatccatgcgcatgtccagcggcccatcgcgcataaaggagaacccgcgttccgcgtcgtccagctgcggtgaagaaacgccaagatcgagaaggataccgtcgatcttgccggtaagattgcgctcggcgacgtagtcagccagctgcgagaaaggaccatgtacgatggaaaagcgtgggtcatcgatggtttgcgcaacggcaatagccgtcgggtcgcgatcgattgccaacagacgcccttccgccccagttgggagaggatcagacgcgagtgaccaccgcggccaaaggttccatcaatgtagataccatttggacgaatattcaggccgttaacggcttcatccagaagtaccgtagtgtgtttaaaattttccatcattttataaagacaaatcctgcaggcgctccgacagttcaccggtagcggactgctcagcgtcgatatcttccttgacccgttgataccaggtcgtttcatcccacagttcaaatttattaaactgtccgaccagcatcacttcttttgtcagcccggcatgttgccgcagcaccggcgcgattagcaatcgtccggcgctatccatctgacattcgctggcatgccccaaaagcaggcgctgtacgcgccgctcaacgggattcatgctcgacaaacgcgacaatttttgctcgatgatttcccattcaggcaaaggataaagcagcaggcacgggtgatgaatgtcaatggtgcataccatttgaccagaagcatcctcgatcagcccgtcgcggtagcgcgtcggtacggccaaacggcctttactgtcgagattgactaacgttgctccacggaacatgccagcctcaccccttttcgccactttaccccacaaattcccacctaaaggagtttacggagcggaggaaaagcttgtcaagccagcactaatgccaacggagcgcaaaaacccattatttacagccgatattagccctgatgaataaatcaccaacaaacgaggcaaattaacgttatgaatacgtgtaagaaaataaccaacaaacccgtaacagttaaaagcgacaaaatatcttcagcgggaaaatataaagtgtcagtttgcgacgcgagcggcattttaggccattctgatgtccgttaacagtgcctgttgtggacggagaagcacttgtgccgcggcctgacgctctcagcggcggtgaaggttggataaagcgactgttaattcagcaattattacgaagaatgtaacaaaacaattcaaataaatgccgctgcgctttttcttgcaccatttggatacaaaaaaagcgagctccagaataaaaccaaataaggcgtaaagaagtttagggatttgtctgaaagcgaatagatttacgaatctctacgtaaattgtatggaatatcgccagatgctaatccatctggcgaataacctacgaagaatcttaaccttttttcgcaaatgaatcagcggcgattcagacttccgcgatgatagaggttacgacgtatacgacttaatcccggttttggcttacgcggttcatccaggcttgccagtacaatctctaaaacgcgctcggcaacatcgcggtgacgctgagcgaccgccagcaccggacactgcaggaaatcgagcagttcgttatcaccgaaggtggcgatagccagctcggatggcagtttaccctcacggcgcagcgtgacatccatgacgccctgcagcagcgggaaagaagtggtgaacagcagttgcggcatcggatgcgtttcaagccacttttcaaacagctgggccgcggcttcgcgttcataactgttggcatagaggaagttcacttcgcgcgggtcgtctttccatgctgtacggaaaccgtgctcgcgtaaaaaactcaccgacagttcgggcaaagccccaagatagagcactcgatcaccggagaatttgcgcaactcggcggcaagcatttcagcgtcgtcctgatcggcgccgacgacgctggtaaaatgttcacgatcaagcgcgcggtcaagcgcgacaatcgggaaaggatcattcgcccagcgctgatagaacgggtgctccggcggcaacgaagtcgatacaataatcgcatccacctgacgctgtagcagatgctcaatacagcgcatttcgttatccggctgatcttccgaacaggcgatcagcaactggtagccgcgctggcgcgcctgacgctccagatagttcgcaatacgggtataactggtattttcgagatccgggatcaccagaccgattgaacgcgtgcgtcctgcgcgcaggccagcagcgaccgcattcgggtggtagttgtgctcgcgcaccaccgccatcaccttctcgaccgttttatcgctgacgcgatactgcttcgctttgccattaatcacatagctcgcggtggttcttgaaacaccggccagccgggcgatttcatccagtttcacaattgccccttgggtaagaagtacaaaaaacaaccattaaatagacatactcgttagagtatagagttccatttttataacatctaaacgcagaatagttagcgcggcaaccgctttcgtccacagttcctacggaattcgcaaaaaaataacccgacagttcgtgtcgggctatttttacgtcagtttttcagtgcttagcgcatgattttatcgccgcgcgacaggccgaccacaccggatcgcgccacttcgacaatgcgcgcgacatcgcgtaaagaagccaggaacgcatccagcttatcgctggttccggctagctgcacggtataaatagatggcgtgacgtcaataatctgcccgcggaatatctcggtgttgcgtttcacctcttcgcggccataaccgctggcctgcactttcaccagcatgatttcacgttcgacatgggatccctggcccagttcgctaacccgcagcacatccaccagcttatgtaattgcttttcgatctgctcaatcgctttctcgtcgcccaccgtctggatggtcatgcgggacaaggttggatcgtcggttggcgctaccgtcaggctttcaatattgtagccgcgctgcgaaaagaggccgatcacccgggataacgctcccgattcgttctccagtaatacagataatatccggcgcataatcaggttctctccgttttgctcaaccacatttcgtccatgccgccgccgcggatctgcatgggataaacatgctcgctaccatcaaccgtaacatcaacgaacaccagacgattattacgcacctgctccagggcttccgccagcttcccttccagctcctgcggctcgctgatacgaataccaacgtggccataagcctcggcgacgcgaacgaagtccggcagcgattccatataggactgcgaatggcggccggaatagagcatatcctgccactgcttcaccattccgaggtagcggttattcaggttcagcaccagcaccggcagttcatactgcagggcggtggaaagctcctgaatgttcatctggatactgccgtcaccggtcacgcagataacggtttcttgcggtagcgccatcttcacgcccagcgccgcaggcaggccaaagcccatagtgccgaggccgccggagttaatccaacgtcttggtttatcgaatggataatagagcgcggcgaacatctgatgctggccaacgtcggaggtcacataagcatcaccattggtcaggcgccagatagcctcaatcaccgcctgcggtttgatcttgccgctttgcgtgtcgtattgcaggcagtgacgggaacgccactgttcgatctgctgccaccagtcgcggatctcatccagcggctgctggctctcttcctgttcaagcagatcaaacatctggtcaagcacctggcgcgcgtcgccaacgatcggcacatccgccgggacagtcttggagatcgacgtgggatcgatatcaatatgcagcaccgtggcgttcgggcagtacttagccaaattgttggtggtgcgatcgtcaaagcgaacgccgactgcaaaaataacgtcggaatgatgcatggtcatgttggcttcataagtgccgtgcatccccaacatgcccagcgcctgctgatgagtcgccggaaaagcgcctaagcccattaatgaagagaccaccggtagcttcagcttttcgaccagcgtacgcaattgtgcttcgcactgcgaattgattgccccgccgccaacgtacacgaccggttttttcgccgccaccagcgtttgcaacgcacgtttaatctgccctttatgaccgctggtcgtcgggttataagaacgcatgctgaccgcatccggccaaacgtaaggcagctttttcgccggattgagaatatccttcggcaaatcgacaactaccggccccggtcggccgctggccgccagccagaaggctttctttaaaataccgggaatatcttcagtctgtttcaccaggaagctgtgtttgaccactggccgcgagataccaaccatatcgcactcctggaaggcatcgtagccaatcagcgaggtggcgacctgcccggaaagaatgaccagcggaatggaatccatgtaagccgttgcgataccggtaatagcgtttgtcgctcccgggccggaggtcaccagtaccaccccgacttcgccggttgcgcgcgccagcccgtcggccatatgcaccgccgcctgctcatggcggaccagcacatggtcaatgccgccgagagtatgtaatgcatcatagatatcgaggaccgcgcctccgggatagccgaatacttgcttgacgccctgatcgacaagcgattggacgaccatctcggctcctgacaacatctccatggtttgcctccaggcttattgttttcacgacggcggaagtcattttccgcgcgcgtcgtatgatgcgccgctaaaggcagcgcattgaagtgaacgacttgctgtgcattaacataactgctcgccaacaggcaggcaattcacctgagagcgtatagcgcgcatctcaaaagcagaaaagaaagcatctggagaaatatatggaggattgcttcaggaataacaaaatgagacagccaatactcgggagaaaccgcttacggcagaaaatcatccatttttcaccgccgggttgcgagaacccgcggtgacaaacagaataatattctgctttttaatgtttactcagataagctggcgatttcgccgccgttggtcgataacgtcgattagcgctggcagatattcgccaataactcttccatccattgatggcctttatcgcgaccggccgcttcgtgccaggagaggaagcatgtgcggctgttgaccttcagcggcaacggtaagatctgcaaatctaatttatccgcgaattcattggctaaccaacgtggtgcgaccgccaccatatgggtttgagacaccacgtttaatacgctaaccatggcattgccctggtaagcaatacaggattgtttatccacggagtcataccacggctggctaaaagaagcataacgatctaatgcgacgaccgcgtgctcttcctgataaatatccgcttccgttaacggcccggaaatacgtggatgtttacggctggcaaccagaaccatttcatctttgaatagaggtatgcaggcgaactccggacgacggaactcttcataaccgataacgaattcaatttcctgataacgcagctgatgttcggtgttttgatgtagcgctgatttaaagaccagatgaatatttggcgcaatctcaccaactttattaaatattagcgaggttaagtaattatccaatgggctacaaacgcagaggttaaatacgcgctcgctgctcagcggttcaaagcctgacccaggcagctcattttgcaccagttgcaaagcctggcgtacggagccgaacagctgatatgcccgcgccgttggctgaatgccgcgcccataacgaacaaacagttcatcattaaacatcaccttgagacgggataccgcattactcaccgccggctgggacatgccgagagtatgggccgcacgggtaatattttgttcctgcatcaccgcatcaaacacggtcagtaggttgagatccaccatccgtagttgtggttttacgacttcctgtcccggggctgatttatattcagtattttcaattaacatatctaactccaccgtcacgctaaattccttttaccaaagtgcagtaattaattaagacaatatcatttatcatgcatattaaatctgcaaaagggcaaaacggaattttaggaatatatcaaggttatgagtagcgacgaaaaacctcacaggacatcaccggaacccgcctaaaacatatcatttacttgatgatataaagtgtacccatagatcataggaataaacaacaccaccaatagttaattgcaatttaagtattaattaactatctattttttacctgacaaaaattaacacttcgttatccttttgaacgaataaataggggagcgcataaagataaaaggcggataacactttatgtttcattaggttatcagccagccattccccattgacattgagtccttgaatgaaaactattttttctagttgttttatttttccagggtaataggaatgtcttaaataggatcgtcggtaaaatgagggataatccagcacaattagctaattcagctgactggttaaaaacagtttttatcttgcctggggttgacatcaaaaccgctatccagtaactctaaaagcatatcgatttcaactggagtatgacgcatgattcgcaccactcgcttcaccagcctactactactaaacgcatccattgtgcgcggtaggctgttgggcgacgttcagcgttaagtcatcttccagcaagacactaaacccgcgccattgcgcgggtttttttatgctcgaagcaaggcgccaggcaacagattaaggatctaaaccatgagccagcaagtcattattttcgatacgaccttacgtgatggggaacaagcgttacaggccagcctgagcgtgaaagagaagctgcagatcgccatggcccttgaacgtatgggcgtcgatgtaatggaagtcggtttcccggtttcttccccaggcgattttgaatcggtacagactatcgctcgcaccatcaaaaatagccgcgtgtgcgctctggcgcgctgcgttgagaaagatatcgacgtggcggcggaatccttaaaagtggcggaagcgttccgtatccacaccttcatcgccacgtctccgatgcatatcgccaccaagctgcgcagcacgctggatgaagtcatcgaacgcgctatttatatggtgaaacgcgcgcgtaactataccgacgacgtggaattctcctgtgaagacgcaggccgtacgccgatcgacgatctggctcgcgtcgttgaagcggctatccgcgccggcgccacgacgattaatatcccggataccgttggctataccatgccgttcgaatatgccaacatcatcagcggcctgtatgagcgcgtgccaaacatcgataaagcaatcatttcagtccacacccatgacgatttaggcatcgccgtcggtaacgcccttgccgccgtccacgctggcgctcgtcaggtagaaggtgcgatgaacggtatcggcgaacgcgccggtaactgcgcgctggaagaggtgatcatggcgctcaaagtgcgcaaagacatcatgaacgtgcacaccaatatcaatcaccacgaaatctggcgtaccagccagaccgtcagccaaatctgcaatatgccgatcccggcgaacaaagctatcgtcggtaccggcgccttcgcccactcttccggtattcatcaggatggtgtgctgaagaaccgcgaaaactacgaaatcatgaccccggaatccatcggcctgaaccaggtacagctgaacctgacttcacgctccggccgcgcggcggtgaaacaccgtatggaagagatgggctacaaagagagcgactacaacctggatcatctgtatgacgccttcctgaagctggcggataaaaaaggccaggtcttcgattatgacctggaagcgctggcgttcatcaataaacagcaggaagagccagagcatttccgtctggactacttcagcgtccagtctggctccagcgatatcgctaccgcctctatcaagctggcctgcggtgatgacatcaaaaccgaagccgccaacggcaacggcccggttgacgctatctaccaggctattaaccgcgtgacggactacaacatcgacttagtgaagtatggcttaagcgccaaaggccacggcaaagatgcgctgggccaggtggacattgtcgtggaatacaacggtcgccgcttccacggcgtcggcctggcgaccgatatcgtcgaatcttcagcaaaagcgatggtacacgtgctgaacaatatctggcgcgccgccgaagttgaaaaagaattgcaacgccaagctcagaataaagagaacaacaaggaaaccgtgtaatgtcgaagaattatcatattgccgttttgccgggtgatggaattggcccggaagtgatgaaccaggcgatgaaagtactggaagccgttcgtaaccgtttttcaatgcgtatcaccaccagccagtacgacgttggcggcatcgccatcgaccgtcagggcatgccgctgccgcaagccaccgttgatggctgcgagcaggctgacgcaattttgttcggctccgttggcggcccgaagtgggaacatctgccgccggccgagcagccggagcgcggcgcgctgctgccgctgcgtaaacacttcaagttattcagcaacctgcgcccggctaaactgtatcaggggctggaagcgttctgcccgctgcgcgccgatatcgccgccaatggcttcgacattctgtgcgtgcgcgaactgaccggcggcatctacttcggtcagccgaaaggtcgtgaaggcagcggccagcacgaaaaagccttcgataccgaggtataccatcgttttgaaattgagcgcatcgcgcgtatcgcctttgaatcggcgcgcaaacgtcgccataaagtgacgtcaatcgataaagccaacgtcctgcagtcttctatcttgtggcgcgaaatcgtcaatgagattggcaaagagtatccggacgtcgaactggcgcatatgtatatcgataatgccaccatgcagcttattaaagatccgtcgcagttcgacgtactgctgtgctccaacctgtttggcgacatcctgtccgacgagtgcgcgatgatcaccggctctatgggcatgttgccgtccgccagcctcaacgagcaaggttttggcctgtatgaaccagcgggcggctcggcgccggacatcgcgggcaaaaatatcgccaacccaattgcgcaaatcctgtcgctggcgctgctgctgcgctacagcctggatgcgggcgacgcggcgagcgccattgaacgcgctatcaaccgcgcgttagaagaaggcattcgtaccggcgacttagcgcgcggtacggcagcggtcagtacagatgaaatgggcgatatcattgcccgctatgtcgcggaaggggtgtaatcatggcgaaaacgttatacgaaaaattgtttgatgcgcacgtggtgtacgaagcgcagaacgaaaccccgctgctgtatatcgaccgccatctggtgcacgaagtcacctctccgcaggcgtttgacggcctgcgcgcccatggtcgccaggtgcgccagccgggtaaaacattcgccaccatggatcacaacgtctcgacgcagaccaaagatatcaacgcctccggcgagatggcccgcatccagatgcaggaactgattaagaactgcaaagaatttggcgttgagctgtatgacttaaatcatccgttccagggcatcgtacacgtgatgggcccggaacagggcgtcaccctgcctgggatgaccatcgtttgcggcgattcccataccgctacccacggcgcattcggcgcgctggcattcggtatcggcacctctgaagttgaacacgtattggcgactcagactctgaaacagggccgggcgaaaacgatgaaaatcgaagtccagggcaaagcggcgccgggcattaccgcgaaagacattgtgctggcgatcatcggcaaaaccggtagcgccggcggtaccggccatgtggtcgaattctgcggcgaagccattcgcgatctgagcatggaaggccgtatgactctgtgcaatatggcaatcgaaatgggcgccaaagcgggtttggtcgcgcctgacgagacgaccttcaattacgtgcagggccgcctgcacgcgccgaagggccaggatttcgccgacgcggtggaatactggaaaacgctgaaaaccgatgatgacgccaccttcgataccgtggtgacgttgcaggcggaagagattgcgccgcaggtcacctggggcaccaatccaggccaggtcatctccgtcaccgatattatcccggatccggcgtcgttcagcgatccggtcgagcgcgccagcgccgaaaaagcgctggcctatatgggcctgaaatccggcgtgccgttgaccgaggtcgcgatcgataaagtctttatcggttcctgtactaactcgcgaatcgaagatttacgtgcggcggcggaaattgccaaagggcgtaaagtggcgccgggcgtacaggcgctggtcgttcccggctccggcccggtgaaagcgcaagcggaagccgaaggtctggataagattttcatcgacgccggttttgagtggcgtttaccgggctgctccatgtgcctggcgatgaacaacgaccgtctgaatcccggcgaacgttgcgcctctaccagcaaccgtaactttgaaggccgtcagggccgcggcggacgcacacatttagtcagcccggcgatggccgcggcagcagcggttaccggccatttcgccgatatccgtaacttgaaataaggagaccatcatggcagagaaatttacccaacatactggcctggtggttccgctggatgccgcaaacgtcgataccgatgcgatcattcctaagcagttcctgcagaaagtgacacgtaccggctttggcgcgcacctgtttaacgactggcgtttcctcgacgaccaggggcagcaaccgaacccggagttcgtgctgaacttcccgcaatataaaggggcgtctatcctgctggcgcgtgaaaacttcggctgcggctcctcgcgcgagcacgcgccgtgggcattgaccgattacggtttcaaagtggtgattgcgccaagctttgccgatatcttttacggcaacagctttaataaccaactgctgccggtgacgctcagcgatgagcaagtggacgagctgtttaagctggtacaggctaacccgggcatcagcttcgaagtggaccttgaagcgcaggtggttaaagccggggataaaacctacagctttaaaatcgacgacttccgccgccactgtatgctcaacggtctggatagcatcggcctgacgctgcagcatgaagaggcgatttccgcctacgaacgccaacagcccgcctttatgaactaatcttcaagcccggtgaacaagccgggctttctccttttgcccctctcagcgcgtattaatacgtataattaatagatatttttatacttcctgtacctcatcgtgcatttatactggcgttagtgggctatttttgtatatatccacaatgacaagtaaataatctgcggaagtatttaaaacaaaccgagtaatatgtgaattaacggttaactccatagaaaacccctatagctcagcgcaaaaaaaagcattatttttcccctccccggctcgttatctttccagacagagaaatattaactttagatacgccacgccgcttacatcacctcgtgggccgccgggcgttcttgtggagagcctaaatgagccactatcctcatctattcagcccgctgaccatcaacgggatgaccataaaaaaccgtattattatgccgccgatgggcaccaatatggctaccctcaacggcgaggtctcacaggaacagcttgaatactacgaactgcgggcgaaaggcggcaccgggctcattaccgtggaaaatatctgcatcgattttcccttcgcctccaatggcacgacgcagttgcgtatcgataacgatcaatatattccacgcctgtttaaattaaccgaaaccctccataaacacggcgcctgcgtagcgattcagctgaatcatgcgggcgcttcggcttatgcttatcgcctgaatgggcagacgccgctttccgcatccagcacgccgtcgaaaaagcacggtaatattccgcggccaatgacccatgaagaaatttatcacgcggtggacaaattcggcgacgccgcggagcgcgtacgccgcgccggatttgactgcgtagaaattcatggcggccactcctatttaattagccagtttttgtcaccgttatttaataaacgtaccgacgaatttggcggcagtatcgaaaaccgcacccgcatattaagcctgattatcgataaggttcgcgcctgcgtcgggccgcgtttcccaatcagcctgcgcatcagcgccgacgatttcttaaagggcggcaacacgctggaagattcgctgcgcatcctcgaactgtgccaggacaaagtcgacatcattaacgtctctgccgcgcagaacgataacctgaacctgcaaatcgaccagatgtcgctggaagatggctggaagcgctatctatctcgcgcggtacgcgacaaattccataagccgacagtgatcgccggcaacattcgttcgccaaaaatcgccgaagacatcctcgctaccggcgatgccgatctgatcgccattggtcgcgggttgattgctgagcctgaatgggtgcagaaagtacaaagcggcaatgagcgtctgatgcgcaaatgcatctcctgcaatatcggctgcgcggatcaccgtatcgcccgctctcgcccgctgcgctgctcgattaatccggacattatccacggcgacgcttacaagcagcagcgtgtctcacgcgagaccaacgtcgtggtgatcggcgccggcactgcaggaatggaagccgcctgcaccgccgcggaagtcggctgcaacacctggctgctggaagagaaaagccacgtcggcgggctggccagcaccattgcgctgctgccggagaaaaagcgcatcgccgatttcccgcagtttatgaaaaaccgcctctctacgctgagcaatctgatgctgcaggtcggtaaacgcgccgatgtcgcttcagtcgccgcgctgcatccgcagctcatcgtcaacgccaccggctcggttcccctgctgccgccaatcgacggcctgcgcgagaacattgacgccgaaggtggccgtctgttttcaataaccggcatgattgaacaccttgacgcctttgccgatgccgcaggtaaacgcatcgtggtggttggcggcggcgccgtcggcctggacgtcatcgaatacttctccgcgcgcggcgccgagacggtgctgatcgagatgcaggacgcgccgggacaggacctcgacattattaccaaaaacgcgatgttgaccatgctggaagaacaccaggtggaacaacacatgcagacccgattgaccgccgtagcgccagaccatttcaccgttaataccgtcaatggcacgttcgacatacctttcgactacggctttgtctgcctgggaatgcgcgccaaccgcgctggtctcgacgacatcgcccaatgggccgccgccaacaacgtaaaaatcatgaatatcggcgacagcctgtcggcacggcgaattatcgacggcgtgcgcgaaggccgcaacgtgctggagatactcgaagacatgggcgtactcggcaatcgcgaagcgcaacagattccatttttaacatattgaggatatttatcatggcagaacgtcttaccggtcataccgaactgattggcttaatcgctaccccgattcgtcatagcatgtcgccgactatgcacaacgaagcctttgcgcatcttggcctggattacgcctacctggcgttcgaagtcgataaccaggagctaaaagatgtcgtgcagggtttccgcgcgctaaaactgcgtggctacaacgtctcgatgccgaataaaaccgaaatttgccagtatctcgacaagctctcgccggcggcgcagctggttggcgcggtcaataccgtggtcaacgataatggcgtgttaaccggccacattaccgacggtaccggctatatgcgcgcgctgtcagaggccggtatcgatatcatcggcaaaaaaatgactatcctcggcgcaggcggtgcggctaccgccatcagcgtacaggccgcactcgacggcgtgaaggccatctcgatcttcaaccgcaaagacaagttcttcgccaatgccgaacagaccgtcgccaagatccgcgacaacaccgactgcgagatccacctcttcgatctcgacgatcatgacaagctgcgcgccgaaatcgacagcagcgtgatcctcaccaacgccaccggcgtcggtatgaaaccattcgaaggccaaatgctgctgccaaacgacagcttcctgcgcccggacctgattgtctccgacgtcgtctataacccgcgtaaaacctatctgcttgaagtggcggagaaaaaaggctgccggaccctcaacggcctgggaatgatgctgtggcaaggcgcgcgcgccttcgaaatctggacgggcaaagagatgccggttgactacgtcaagagcattctgttctaagaggccagagatgaaaaataaatacatccctactgcggcagggctgtatctcaactacctgatccacggcatgggggtgcttttaatcaccctcaacatggcccatcttcaggaacagtggggaacagacgctgctggcgtatcgatcgttatctcctcattaggtatcggtaagctggcgacgatcgtgaccggctttttgtcggatcgttttggtcgtaagccttttatctatcttgggatcctgagttatctgatcttcttcgtcgggattctgctgaccaaaaatatctatctggcctacgtgttcggcatcatggccggtctggcgaacagcttcctcgattccggaacctatccggcgctgatggagtctttcccgcactcggccagccgcgctaacgtgctcatcaaagctttcgtttccgcagggcagttcctgctgccgtttattatcagcctgctgatatgggcaaatatgtggtttggttggtcgtttgtgattgcggcggctctgtttgtattgagcgcaatctatctgctcaagatgccgttccccgatagccaggcggccaaaaaggaagagaccccagcaacgcaggcatcagcttctgctaagccgcaagccaacaaactggatatggtgatctttactctgtacggctacatcggcatggcgaccttttacctggtgagccagtggctggcacaatatggtcagttcgttgtcggtatgccttatgcctcggcgatcaagctgctgagtatctataccgtcggttcactggtctgcgtcttcgtgaccgccgccttcgtcaaagaggtgttcagctccgcggtcgccatgatcatttacacctgtctgtcgatggtctcactgctgttagtgtgcttgttcccgacaccggtgatggttaccggtttcgccttcgtcatcggctttgccgccgccggcggggtactgcagttgggggcgaccatcatggcaatgagtttcccgaatggcaaaggcaaggcgaccgggatcttctacaccgctggcagcatcgcgagcttcacaattccgcttatcaccgcaaaactttcgcagattagcattgccagcattatgtggtttgatttcctgatcgccgtcatcggctttgtgatcgccttgtacatcggctatcgtcaacttcaggcacgcgcggcgcaaagagtgtcccgcaccaccgtcaccgcctgaggttcaacgacaacaataatggatacctacatgacaactgcagtaaccgtaaagaacatcaccttcaaggaaggcgaaaccttaatttgcgtaccgctgatcgggaaaacgcaggatgagctgctgactaatgctcagggcctggttgacgcaggcgctgatattatcgaatggcgcgttgaccattttacccacgtccgggaaatcccccaggtgttgaccgcgctggcggaaatccgtaataccctgaaagctctgccgctgctgttcaccttccgcagtaagaaagaaggcggcgaaacggaaatcagcgacgaagcgtattttgaacttaaccgccaggcggcgctaagtggattagtcgatgttatcgacatcgagctgtttaacgatgaagcgcaaattcgcgcgctggtgaaagatgcgcatcaagccggcgtaaaagtgatcatgagcaatcatgatttccataaaacaccggctcaggaagatatcatctatcgactgcgtcgaatgcaggatctgggtgccgatctgccgaagatcgcggtgatgccacaaacgcctcaggacgttctcactctgctttccgccacgctgaccatgaaagagaagtacgcgacgcgcccgctgatcaccatgtcgatgggcaaatccggcggcgttagccgggtaactggtcgcttgttcggttcagcgatgacctttggcaccgtcggccaggcctccgcaccgggccagatagccatcgctaagctgcgcgaactgatggacattctgtcctgataaacaggctgcccggagccagtctccgggcgcttgctcagctgattctctgactatcgttaataatgacgtttttaaacgattgaatcgctgaggaaagtaccctttccttcattgttgcaaggtagatataacgagggggatcgcgtttttaatcttcagaatgtgcacgttataatttgccagtgcggagatcctcggcataatcgcaatgccatagtcgatgctaaccagccccgccatcgcagtatcttcatcgacgtagcaggcgatatccggtaccagtttttgttgcataaagacattatcaataaaaggccgaaggccactgttctctgaaaaatagatataggggtagtgaatcgtctcaaccagatcgacctcattatcatatagtcgggcaagcggatgatctttcgccgtcaccaccaccagctcctgctgaataatgggaataaagtcaatatcgggttcatcggcgatataggaacaaattgccagatcggtttttcctgcctttaacgcttgtaataacgaaagcgaagtgccttgcgtaaaggaaaaagtcaccttgtgactggaaggtgaattagtgtatttattaattaactgcggaacaacaaattcacccatcgtataaataaaggcgatacgaatattctctttcttttcgctatcattgttttgcagcgtcaggcgtccattttctaaagaagcgagcgcatcctccacataaggtaaaaaacgtttaccgttttgcgtaattttgacgttgcgtccttttctggcgaacagcgccacgcccagttccttctccagctcagatatggcgtggcttagcgagggttgagtaatgaacagactggatgctgcctcggtgtaatgctccgtctcgctcaatcgcttaaaataataaagttgcttcaggttcattatttttgtccgtataatataagaataagaccactgcgtttaatataccatgcggcaggttgataatacgttacaacgagtcaatatcagattcacatcaaatattatttgatatttctttttgtgcgtaacaaagcgttgccattcatagacccagtctatgaatccttagagtatttctgcatgcataaatacatgcaaaaatattttaaactttaaaggaaatctttatgtgcatacctgacgctcaagggagtctggcatcatcgcccggcacgctaaaaagaagcagaacgcgtatttttattttatcgctgttatcgctgggtacgatgattaattatctcgatcgtaccattcttggaatcgttgctccaaaattaaccactgaaatccatattgatccggcgatgatgggcattgttttttccgcttttgcctggacttatgcgctggctcaaattcctggcggcatgtttttagaccgattcggtaataaattgacctacgccctctccatcttcttttggtctctgtttacactgctgcaaagcttctctctggggctgaaatctttgctccttttgcgtctggggctaggcgttagcgaagccccctgctttccggccaatagccgcatcgtcagcaaatggtttccccagcatgaacgggccagggctactgcaacttatacggttggtgaatacattggattagctgccttctcaccattattatttttaatcctcgaacaccacggctggcgcaccttatttttcctgaccggcgggctaggaattttattcactttcgtatggtggcgtttttatcatgagccgcatgaatcgaaaacggcaaataaagcagaactggattatattggcgccaaccagattgccaataagagtgaaaacattccatttaactggcatgatgccaggcgactactgtgctgcagacaaattatcggcgccagcctggggcagtttgccggtaacaccacgctggtctttttcctcacctggttccccacttatctggccgacgaacgccatctgccgtggcttcatgtgggctttttcgccacctggcccttcctggccgccgcggttggcatcatcttcggcggctggctttccgatagactacttaagcgtaccggctcggcaaacataagccgaaaactgccaataatttccggattacttctttccagctgcattatcgccgccaattgggtcagcgcgaattcgacggtgattattattatgtcgatcgctttctttggtcagggaatggttggtctgggctggacattaatatcggatattgccccggataatatggctgggttgaccggcggtatatttaatttctgcgccaacctggcatcaattatcgcgccactcatcattggcgtgattatatcagccaccggtaacttcttttacgccctcatttacgttggggtgaccgccctgatcggggtgattgcctacatctttatcatcggcgacatcaagcgaatcatactgaagtaacgctatcccgcgcgggccagcatggccggcgcgggagattgacttaaatatctctaaccctactggtcaaaaacagcgtcagtagcgaaatcgccgcgattgtccagtacacgctaccgtgaccatagctttgcgacagcgctccctgaatcactccggccagaataaccccggtggagatactgttggtaaacagcgtggtcgccgccccggcgcgccccggcatcagatcctggaaccacaacatgccgatcccggcgataataccgatgaaaatagcattgaataactgcagcgccagcagcgccgtgcggccatggaacataatcagccccacatagaacagcacgccagcggcgactgccgccaccatcattttgcgtttaccccaacgcttaacgtagtagccggccaggatcattgccggaatttcaaggccggcagccgtccccatcagtatccccgccaggctatccggcaggccaagatcgctactgatccacaacggcatatcgatgatatacatcgtgttgcaggtccacatcagcgttgaggcgataaatagcatgcgcacgtttttatcgcgccagccgccttccagctccggcaggctgctgccttcctgtgcttgcgtcactcgcgccaccgaaggcagcttaaaggcaatcagcgccaggctgatgacaaaaatcccggcggcgatggaaaacatggtcgtaaagccataattcaacgccagcataaaagccagcggcgggccaatgacccacgccagcgacagctgggcacgcatcaccgagctgaacatcaccacttcgcgggcagagctatcggcgtattcgcgggcgagggcaaacagctgcggcattgccgcattagcgaccgacgccagcatgacgccgcaggtgataagcgtcagataatggcggttgaaagcgaacaacagcgcgttacctaccgccatcaggcagcagaacataattaaccgccgacgatcgccgcggctatcggatcgtttggccaacgccaggctcaccaggataccggcaatcgcattcaccgtataaaacaggccgacccaaaaaggctgcgcgccgacttcacggctgagaaacaggctaagcgtcggcgcctgcagcgccccggccaccccatcataaaagccaccagcataaaggcggcgtaaacgccgtttagccgtcgccccatcgtcatcaaccacagcatgaaatatccttaacacacgcgaagtaaacgaaaaaagccagcagaagcaatctgctggcgggtgattcaatactctggatttcgagttgcagccaatgcgcttgcagcctgaaagacggcgagtataacaccaatactcagtcacacatgatgtcggcaagtcaacggtcggaggtcggcgacgtaactccccactgcatcaattcctccagcattttctgctgcctacctgctaactggcgggccagccaggacgcaccctgcgtcgcagaaaagtacctttgatagaactgcttagtggttgacctcgtcatattcatctccttacttcatcgaggtgcattattggcttaatataggaactgataaattgctgagttttcttcaggagttccccttttatgccttccagccgtctgcaacaacagttcatccgcctgtggcaatgctgcgacggcaggtcgcagcagaccaccctcaacgaactggccgaaatgctcagctgttcgcgccgtcatatgcgcaccttgcttaatctgatggaagcgcgcggctggctggcgtgggaatccgaagccgggcgcggcaagcgttcccgactgaccttcctttataccggtctggcgctgcagcagcagcgcgccgaagatctactggagcaggatcgcatcgatcaactggtgcaactggttggcgataaaacggcggtcagacagatgttgatctcccaccttggacgcagttttcgccaggggcggcacatcctgcgcgtgctctactaccggccgatgaagaatctactgcccggcagcgcgttgcgccgttcggagacccacatcgcacggcaaatttttagcgcgctgacgcgggtaaatgaggaaaatggggaactggaggccgatatcgcccaccactggcagcaaatttcgcctaaccactggcgctttttcctgcgtcccggcattcatttccatcatggacgggagctggaaatggacgacgttatcttctcgctacagcgcagcagcgaactgccgctattttcccatattgagcgcatcgtctcgccgaccgcctggacgctggatattcacctcagccaaccggaccgttggctgccctggctgttaggccaggtcccggcaatggtgctgccgcaggaatggcggacgatagagaacttttccagtatgcctatcggtaccggtccttacgcggtcgcgcgcaataatcaaaatcagttgaaaatccatgcgtttgaagagtacttcggctatcgggcgctgatcgatgaggttaatgtctgggtgctgccggaaattagcgaagaacccaacggcggcttaaccctgcagggcaataccgagagcgaaaaagccgtagaaagccgcctggaagaagggtgctattacctgctctttgatagtcgcagcccgcttggcggtaatgatgacgtgcgccgctggttaagttatctgttccagcccgccaacctgctgtatcacgccggcgagcactatcaaggcaactggttcccggcctacggcttgctgccgcgctggcatcacgcccgcagtcacgcctgcgaaaaacctgccggcctggagtcagtcactctcacttactatcgcgatcatgtggaacatcgggtcattggcgggatcatgcgggcgctgctggctgaacatcaggtgaggctgaacattcaggagctggagtacgatgactggcatcgcggcgaaacggtgagcgatatctggctcaacagcgtcaacttcacgctgccaatcgatttttccctgttcgcttatttatatgaagtgccgctgatgcatcactgcattcccatcgactgggaggctgatgccaaccgctggcgcgcaggcgagttcaacccggcgacatggagccagcaactgctggagaaacagcatattgttccgctgatccaccactggctaatgattcagggccagcgcagtatgcgcggcgtgcgcatgaacaccctcggctggttcgactttaaatcagcctggttcgccccgccggagccctgaatgctttgcgtcatctaacaaaatcattacactatcgccgttctcaacggggtgctaataaacatacgcaatatcattcaagttgcatcaaggcagcaagcgggtaaatcccctggagcatagataactatgtgactggggtgaacgcgcgaagctaacgcagatgcggcttgaaggatgaagcgtatgggctgagaaaatacccgtcgaacctgatccggataacgccggcgaagggatttgaggcctactcaaaatcctttgcctccccatatactgaggtgcaaagtgttgaaaaaactgcttcccctgctggcgctggtcgccgccccggtctttgctaaaccggtcctgaccgtttacacctacgattcattctccgccgactggggtcctggccctgcggtgaaaaaggcctttgaggccgattgcggctgcgaactgaaatatgtcgccctcgaagatggcgtatcgctgcttaaccggctgcgaatggaaggcaaaaacagcaaagccgatatcgtgctcggccttgataacaatctgctggcagccgcggcgcagagcaaactgtttgccaaaagcggcgtgccggccagcgcggttagcgtaccgggcggctgggataacgatactttcgtaccttacgactacggctacttcgccttcgtgtatgacaaaaacaagctgaaaaatccgccgaaaagtctgaaagatctggtcgagagcccgcagaaatggcgcgtgatttacgaagacccacgcaccagtacgccagggctcggcctgctgctgtggatgcaaaaggtgtatggcgataaggcgccggaagcctggcagaagctggcggccaaaaccgtcaccgtcaccaagggctggagcgaagcttacggcctgttcctgaaaggcgaaagcgacctggtgttgagctacaccacctcgccggcttatcacctcatcgaagagaaaaaagataattatgcggcggcggactttaccgaaggccactatctgcaggttgaagtcgccgcgcgtaccgccgccagcaagcaaccggaactggcggagaagttcctgaaatttatggtctcgccaggcttccagaacgccatccccaccggcaactggatgtacccggtaacccaggtcgcgctgccggctggcttcaacacgctaaccaaaccgcaaaccacgctgcagttcaccccgcagcaggtcgccgctgaacgtcaaaactggatcggttcatggcaacgcgccgtcagccgctaagtttcggctggctgatccccggcgccgcggcggcctgcttactggtcatcgtagcgctggcggcgtttctggcgctgtggctggaagcgccgcaggcgccctggcagacgatcctcagcgatagctatctctggcacgtcgtacgcttttctttctggcaggcgtttttgtcggcgctgttttcggtagtgccggcgatattccttgcccgcgccctgtatcgccgccgctttccggggcgcacgctgctgctgcgcctgtgcgcgatgacgttgatcctgccggtactggtggcggtgttcggcatcctcagcgtctatggccgccaggggtggctcgccgcgctgttccacgcgctcggctggcagtgggatttctcgccatatggcttacagggcatcctgctggcccatgtgttctttaatatgccgatggcgacccgcctgctgctgcaggcgctggaaaacatcccggcgaacagcggcaaatcgccgctcagctcgggatgcgcggtttcgtcttcttccgtcttgtggaatggccgtggctgcgtcgacagatcccgccggtggccgcgctgatttttatgctgtgcttcgcaagtttcgccaccgtactgtcacttggcggcgggccgcgggccaccaccattgagctggctatctatcaggcactaagctttgattacgacccggcgcgggcggcgctgttagcgattattcaaatgatctgctgccttgggctggtgctgctgagccagcgcctgagcaaagccgtggctatcggcgccagtcagctacaaggctggcgcgaccccgacgaccgtttgcatagtcgcctgtgcgattgcgcgctgatcgcgctcgctctgctgttgcttctgccgccgctgttggcggtaatcgtcgatggtctcaacgtcaatctgccgaaggtgctgggccaagccgcgctatggcaggcgctgtggacctcgctgcgtatcgccctcgccgccggtctgctcagcgtcattctgaccatgatgctgctgtggagcagtcgcgaactgcgcgcccgcaacctgccgctggccgggcagacgctggagctcagcggtatgctcatcctcgccatgccggggattgtgctggcgaccggtttcttcttgctgctcaataacagtatcggcctgccggaatccgccgacgggattgtcatctttaccaacgcactgatggcaatcccctatgccctgaaagtgctggaaaatccaatgcgcgatattgccgcccgctatggcgctttgtgtcagtcgttggggctccagggttttaaccggctgcaggtggtggagctgcgggcgctgaaacggccgctggcacaggccctggctttcgcctgcgtactgtcaatcggcgacttcggggtagtggcgctattcggcaatgaatctttccgcactctgccgttctatctgtatcagcagatcggctcctaccgcagccaggacggcgcggtcaccgcgctcctgctactgttgctgtgctttatcctttttactttgatcgagaaactaccgggacgcgatgctaaaactcaatgatgtcacctggctgtatcagcatttgccgatgcgctttacgctcagcgtcgagcgcggagagcgcatcgccgtgctgggccccagcggcgctggaaagagcacgctgctgaatctgattgccggttttctgcccccgccagcggtagcctgctaatcgacggtgagaagcataacgccacgccgccggcgcagcgtccggtatctatgctgtttcaggagaacaacctgtttaaccatctcaccgttcgacagaatattggcctcggcatccaccccggccttaagctgaaccgcgagcagcgcgcgcaggtcacggcgatagccgaacagatgggaatggatacactgctggatcgcctgcctggcgagctatccggcggccagcggcagcgggcggcgctggcccgctgcctggtacgccaacagccggtgctgcttcttgatgaacccttctcggcgctcgatccggcgctgcgccaggagatgctgacgctggtcgccgatgtctgtcagcggcaacagttgacgctgttaatggtgtcgcacagcgtggaggatgcggcgcgcattgcgcctcgctccatcgtggtcgccgaagggcgcattgcctgggacggcgccactgacgatctgttaagcggcaacagcagcgcctcggcgctgttgggaattagcgcgaaatgaccttatgcagtatctcaaggtaaaccggcatcagggggtggcggaagacaaacgttagcgccgctaccgccagcgccaccatcaacggcgtcagccacagcaggcgcccacgcggtaaccaacgggtcagacgatcgccggaagttttcgcgctccgccacagccgccagcacagccagcccgccagccacgccagcagcgccgcgcccagcagcagccatttgaagctggcgctgttttcatcggcaggaatatcaattgccgcgccggcaaggataccggggaggaaatagagcggcggccagagcaggcagccaataatattcggcagcacgaacttcgccaccggcaggtcgagcatcccggcgaccatcggcaccaatggccgcgtcggcccgacaaagcggccaatcagaatcgtcaccatgctgtgctggtgcagcgcgtgttcggttttctccagcagcgcgcgattttttttcataaacgaccagcggtgtaacggctttttaaagcgccagccgagccagaatgagatccagtctcccaacaggcagccgacaatccccgccagccaagcctgccagaagttaacttcgccgctgccgataagcgcccccagaccagccatcatgaccgtgccgggtaagataagccccaccagcgccagcgactcaagaaatgccaccagcatcacggctatcaacgagtagaccgtggattgggtgataaagtgttccagcaatgcctgcataatgtacccggttaaaaaacgaagtccggattctccgaagccgtcacgtcgtcgtcaagccaccaattgtcttaatagtttactggctgtgacatttaagcgggtcatcatttcactttctttactttttattcacatcctgcgcgaaattcactggggctggcgccggtgcattttttaaagacccgcgaaaaatagagctgatcttcgaagccaacgttgcggccgacgctggcaatcggcatccgggtggtactcaacagcagtttggcctggctaattcgctgatcttcccgccagccaagtacgctaatccccaactgctggcgaaacagatgcgacagacgagaaggcgacagacagacgtgctgggcgacgctggcgatatcaaaatggctgtccgccagatggtcgctgatgtactggcaggcgtcgcgcacccggttatccagcggcggatgcagcgattcgttaatcgcctccatgcgccgcagtagcagctgttccagcaggttaatcgccagtagttcggaatagcgccccgcccctgcccggcgtcaacgatctgcccgaacagttcgccaaaccgcgcctgccattgctcatccgggcggaagaaaccggtatgggcgaagatcgtcggccagttgagccattcatgccagtaggcgcgtggacggaaatagacccactggtgataccactcgctggcgtcgggatggcggccatagtggtgaatctcccccggcggaaacagcagcatatcgccgggacgacagacgaactgttcgccgtggttgttgatcaccccctcgccgcggatcgtcaggttgagaatatagcctttcatgcccagcgggcggtcgataaagaagtcgagatatccctgcgcctcaatcggcgtcaggccggtgaccagatgggcgttaaaggagtagcccggcagcagcggatcgttttgcgtttcggccataagcgtcgttctccacgagttttttgacaccaattgtccatattcatcattttatcgccatccacgccgtttcgactgcgataccggtgggaatttagacaaaaacccgcacggctagcgaaaaaagcgctaccagcacgcattccgcgttgatccagcgcataacaaaagtgtctataaatacggcaggaaagtccacatcgaatatttgcacggcgtcacactttgcaaggtgacagcaatataatccataagattagcgaatacggcctgacggatttggccggggatatctactgttgctgcatgaatgatttcagcatggagtaacaagatggcaattgcgattggcctcgattttggtagtgactcagtacgcgcgctggcggtggaatgcgctaccggcgcggagctggcagcgagcgtagagtggtatccacgctggcaggaaggactgttctgcgatgggccgaataaccgcttccgccatcacccgcgcgattacattgaatccatggaatcagcgctgaaaagcgtactggcggcattaagcgctgaacaacgggcgacggtggtcggtatcggcgtcgacagcaccggctcaacacctgcgccgattgatgcagacggaaacgtgctggcgctgcgcgaagaattcgctgacaacccgaacgccatgttcgtgctgtggaaagatcacaccgcggtggaagaggcggaggccatcacccgcctgtgccacgcgccgggtaaagaagactactcgcgctatatcggcggcatctactccagcgaatggttctgggccaagatccttcatgtcactcgcgaagatagcgccgtcgcgcaggccgcggcgtcgtggattgagctttgtgactgggtacccgccctgctttccggcaccacccgtccgcaggatatccgtcgcggtcgctgtagcgccggccacaaatcgttgtggcacgaaagctggggtggactgccgcccgccagcttcttcgacgaactcgacccgattattaaccgccaccttgcctggccgctgttccgcgacacctggactgcggatctccccgtcggcaacctgaccgccgaatgggcgcagcgcctcggtctgccggaaacggtggtcatttccggcggcgccttcgattgccatatgggcgcggtcggcgccggcgcgcagcctaacgcgttggttaaagtgatcggcacctccacctgcgacattctgatcgccgataaacagagcgtgggcaaccgcacggtgaaaggtatctgcggccaggtggacggcagcgtggtgccggatttcatcggtatggaggccggtcagtcggcattcggcgatatctatgcctggtttggccgcattctcggctggccgctggaacagctggcccaacagcaccctgaattgcgcgagccaatcaaagccagtcaaaaacagctgctgcctgcgctcaccgaagcctgggccaataatccgtccctcgatcacctgccggtggtgctggactggttcaacggccgccgcacgccgaacgccaaccagcggctgaaaggcgttattaccgatttaaatctggctaccgacgccccggcgctgtttggcgggctcattgccgccaccgccttcggcgctcgcgccattatggagtgcttcaccgggcagggcattccggtgaataacgtgatggcgctgggcggcatcgcgcgcaagaaccaggtcatcatgcaggcctgctgcgacgtcctgaaccgcccgctgcagattgttgcctccgatcaatgctgcgcgttgggcgccgccatcttcgccgccgtcgccgcgggcgtctatccggatatccctgccgcgcagcgcaacatggcaagcgaggtggaaaacaccctgcagccgcgcgcgcaacaggcgcaacgtttcgaacaactgtatcagcgctaccagcagtggtcggctagcgcggaacaacactatctcccttcggctgcaaaggcggaaaacgccccgcaatctccggcagcgctcacccattaaggatacgaaaatgacgatttttgataactatgaagtatggttcgtaattggcagccagcacctgtatggccaggagaccctgcgccaggtgacgaaacatgccgaacatgtggtgaatagcctgaatgcggaagcaaaactgccgtgcaagctggtactgaaaccgctcggcaccacgccggatgaaatcacgcatatttgccgcgacgccaactacgatgataaatgcgccggattagtggtctggctgcacaccttctcaccggcgaaaatgtggattaacggcctgacgctcctcaacaagccgctgctgcaattccatacccaattcaacgcctccctgccatgggacagcattgatatggactttatgaatctcaaccagaccgcgcacggcggccgcgaattcggctttatcggcgcgcgcatgcgccagcagcacagcgtcgtcaccggccactggcaggataaagaagcgcaccagcgcatcggcgcgtggatgcgtcaggcggtttctaagcaggatacccgccatctgaaagtgtgccgcttcggcgataacatgcgcgaagtggcggtaaccgatggcgataaagtggcggcgcagattaagttcggcttctcggtcaacacctgggcggtcggcgatctggtgcaggtggtgaatagcatcagcgacggcgatatcaacgcgctggtcgatgagtacgaaagcagctaccgcctgacgccagcggcgcaggtgcacggcgataagcgccagaacgtactggacgccgcgcgcatcgaactggggatgaaacgcttccttgagcaaggcggtttccacgcctttaccaccacctttgaagatcttcacggcctgaaacagctgccgggtctcgccgtacagcgcctgatgcaacagggctacggctttgccggcgaaggcgactggaaaaccgccgctctgctacgcatcatgaaagtgatgtcgaccggtctgcagggcggcacctcttttatggaggattacacctatcacttcgacaacggcaacgatctggtgctgggctcgcacatgctggaagtgtgcccgactatcgctaccgccgagaagccgatcctcgacgtccagccgctgggaattggcggtaaggccgatccggcccgtctgatcttcaacacccaaaccggcccggcgatcgtcgccagcctgattgatttaggcgatcgcttccgcctgctggtcaacaccatcgaaaccgtcgcgacgccgcacgatctgccgaagctgccggtggccaacgcgttgtggcaggcgcaaccggatctgcgtaccgcctcggaagcctggatcatcgccggcggcgcgcaccataccgtcttcagccatgcgctaaccctcgacgatatgcgccagtttgccgagctgcaggatattgagctgaccgtcatcgacaacgacacccgcctgccgtcgttcaaagacgcgctgcgctggaatgaagtctattacggttcaaaacgctaagcgcacaagcataatgcccgatgacaatccgctcatcgggcagggagaacaagatgttagaagatctcaaacgccaggtgctggaggccaacttagcgctgccgcagcataatctggtgaccttaacctggggtaacgtcagcgccgtcgatcgtgacaaaggggtattggttataaaaccctccggggtggattacggcctgatgaccgctgacgacatggtcgtcgtcagtctggagaccggtgaagtggtggaaggcaacaagaagccctcttccgatacgccgacccatcgcctgctataccaggcgtttccgtcgcttgggggattgtgcatacccattcgcgccacgccaccatctgggcgcaggccgggcaatcaattccggcgaccggcaccacccacgcagactatttttatggcccggtcccctgcacccggttgatgaccgatgcggagatcaacggcgaatatgagtgggaaaccggcaatgtgattgtcgaaaccttccgtcagcagggaatcgatccggcacaaatgcccggcgtgctggtgcattcccacggcccgtttgcctggggtaaaaacgccgaagacgcggtacacaatgccatcgtgctggaggagatcgcctatatggggatcttctgccgccagctggcgccgcagttgccggatatgcagcagacgctgctcgataagcactatctgcgtaagcacggggccaaagcctactacggccagtaatcacccctgtataaaaccccagcatccatcgtgaaaccaggctataatcaggcctggttttttatcgttgagagcacgcgtgacgcagccgcaagcaggatttttactcacccgtcactggcgggataccccgcagggaacggaactggccttctggctggcgaccgataacggcccgctacaggtcacgttgccgccgcaggaatccgtcgcgtttattcccgaagcgcagcggccgcaggctgaacgtctgctgcagggtgaaaacggctatcgtctggcccagctcgcgctaaaagatttccatcgccagccggttttcggcctgtactgccgcggccatcgccaactgatgcggctggaaaaaaagctacgtgaaaacggcgtcaccgtttacgaaggcgatatccgcccgccggagcgttacctgatggagcgctttatcaccgccccggtttgggtagaaggcgaaacgcgcggttcgcagctggttaacgcgcgcatgaaaccgcatccggactatcgcccgccgctgaaatgggtctcgctggatatcgaaaccagccgccacggcgagctctactgcatcggcctggaaggctgcggccagcgggtggtctacatgctgggccccgaacccgctacgccgccggatgtgggcttcagcctggtctacgttgccagccgtccgctgctgctggaaaagctcaacgcctggtttgccgaacacgatcccgacgtgctgatcggctggaacgtggtgcagttcgatctgcgggtcctgcaaaaacacgccgagcgctatcgcatcccgctgctgctcggccgcggcaatagcgagctggagtggcgcgagcacggttttaagaacggcgtctttttcgcccaggccaacggccggctgattatcgacggcatcgaagcgctaaaatcggcgttctggaacttctcctcattttcactcgaggccgtcgcccgcgagctgctgggcgaaggtaaagctatcgacaacccgtgggatcggatggacgaaatcgatcgccgctttcatgaagataaaccggcgctggccacctataacctacaggattgcgagctggtgacacggatctttcacaagacggagatcatgccgtttctgctcgaacgggcgacggttaacggtctgcccgccgatcgccacggcggatcggtcgccgccttcagccatctctatttcccgcgcatgcaccgactgggttacgtagcgccgaacctcggcgaaattcccccgcaagcaagtcccggcggctacgtcatggactcgcgccccggcctgtatgactcagtgctggtgctggactacaaaagcctgtatccgtcgatcatccgcacctttttaatcgatccggtcggcctggttgaagggctggcgcagcccgatgaccgccacagcaccgaagggtttctcggcgcccgcttctcgcgcgaaaagcactgcctgccaggcatcgtcgggcagatctggcacggtcgcgatgaagccaagcgtcagcataataagccgctgtcacaggcgctgaagatcatcatgaacgccttttacggcgtgctggggaccagcgcctgccgctttttcgatccacggctggcgtcgtcgatcaccatgcgcggccacgcgatcatgcgccagaccaaagcgctgattgaagcccagggctatgacgttatctacggcgataccgactccaccttcgtctggctcaaacgtccacatagcgaagcgcaggcggcggaaattggccgcgatctggttgcctatgtcaatgactggtgggcgcaggaattgggtaaaagccagcttaccagcgcgctggagctggagtatgaaacccacttttgccgctttttaatgccgacgatccgtggcgccgataccggcagtaaaaagcgttatgccgggatgattcaggaaggcgatgcccagcgcatggtgttcaagggctggagacggtacgcaccgactggacgccgctggcccagcagtttcaacaggagctgtatctgcgcatcttccgccatcagccgtatcaggattatgtacgggagactatcgccaggctgatgaacggcgagctcgatgagcaactggtttatcgcaagcgcctgcgccgaccgctggctgagtatcagcgtaacgtgccgccgcatgtgcgcgccgcgaggctagccgatgaacacaacgcgaagcttgggcgggcgcagcagtatcagcagcgcggcaccattaaatatgtctggactaccggcggcccggagccggtggattaccagcagtcgccgctcgattacgatcactatctgtcaaagcaattgcagccggtggcggaaggaatccttcccttcgtcaacgacgactttgctacaatagtgacaggacaactggggctattttgacaggtgactaacaccgcggcatccagtaccatagcgccctttccattcctggacccaattttgattcctcagcgtaactatgctgaggatgaactattgcctgcaattaaagaacaaagagccgaacacatatgccttttacacttggtcaacgctggattagcgatacagagagcgaactaggactagggacagtggtagcgctggatgcgcgcatggtcactctccttttccccgccatcggcgaaaaccgtctgtactctcgcaacgattccccgattacccgcgtgatgtttaacccgggtgataccattaccagccacgaaggctggcagctccacgttgacgaagtaaatgaagaaaatgggctgctgtcctacaccggcacccgcctggatacgcaagaagagcatgttaccctgcgcgaagtcctgctcgacagcaagctggccttcagcaaaccgcaggaccgcctgttcgcagggcaaatcgaccgtatggaccgttttgccctgcgctaccgcgcgcgtaagtttcagagcgaacagtaccgcatgccgtggagcggtctgcgcggccagcgcaccagcctgatcccgcatcagttgaacatcgcccacgacgtaggccgtcgtcacgcgccgcgcgttctgctggccgatgaagtgggcttaggtaaaaccatcgaagccgggatgatcctccaccagcagctgctctccggcgccgccgagcgcgtgctgatcgtggtcccggaaaccctccagcaccagtggctggtggaaatgctgcgccgcttcaacctgcgcttctcgctgttcgacgacgaacgctatgccgaagcgcagcacgacgcctacaacccgttcgaaaccgaacagctggtgatctgctccttagacttcgtgcgccgcagcaagcagcgcctggagcatctgtgcgacgccgagtgggacctgatggttgttgatgaagcgcatcacctggtgtggagcgaagaggcgccgagccgtgaatatcaggccattgaacagctcgccgaacgcgtaccggggattctgttgctgaccgcgacgccggaacagctgggcatggagagccactttgcgcgcctgcgtctgttggatccaaaccgcttccacgattttgaacagtttgttgaagaacaacaaaactatcgcccggtcgccgacgccgtcgctctgctactggcaggcaacaagctgaacgataatgaactcaatacccttggcgatctgatcggcgagcaggatatcgagccgctgctgcaggctgccaacagcgatcgcgaagatgctcaggccgcgcgccaggagctggtttcgatgctgatggaccgccacggcaccagccgcgtgctgttccgtaacacccgtaacggtgtaaaaggcttcccgaaacgcgagctgcacactattcgcctgccgctgccgacccagtaccagacggccatcaaggtctccggtattatgggcgcgcgcaaaaccgcggaagagcgcgcgcgcgacatgctctatccggagcagatctatcaggaatttgaaggcgataccggcacctggtggaacttcgacccgcgcgtcgaatggctgatgggctacctgaccagccatcgctcgcagaaagtgttggtaatttgcgccaaagccgccaccgcgctgcagctggagcaggtactacgcgagcgcgaaggtattcgcgccgcggtattccatgaaggcatgtcgattatcgaacgcgaccgcgccgcggcgtggtttgccgaagaagacaccggcgcgcaggtgctgctgtgttccgaaattggctccgaagggcgtaacttccagttcgccagcaacctggtgatgttcgacctgccgtttaacccggatctgctggagcagcgtattggccgtctcgatcgtatcggccaggcgcacgatatccagatccacgtgccgtatctggaaaaaaccgcccagtcggtgctggtgcgctggtatcacgaagggctcgacgccttcgaacatacctgcccgaccggccgtaccgtctacgatagcgttcacgacgacctgattaactaccttgccgcgccggaatccaccgatggcttcgacgatctgatcaaatcctgccgccagcagcatgaagcgctgaaagcgcagctggaacagggccgcgaccgtctgctggagatccactccaacggcggcgaaaaagcgcaggcgctggcggagagcatcgaagagcaggatgacgataccagcctgatcgccttctcgatgaacctgttcgatatcgtcggtatcaaccaggacgaccgcggcgaaaacctgatcgtcctgactccgtcagatcatatgctggtgccggatttcccgggcctgccggaagatggctgcaccatcaccttcgagcgtgacgtggcgctgtcgcgtgaagacgcgcagttcatcacctgggaacacccgctgattcgcaacggtctggatctgatcctctccggcgataccggcagcagcaccatttcactgctgaagaacaaggcgctgccggtcggcacgctgttgctggagctgatctacgtcgtcgaagcgcaggcgccgaaacaattacagcttaaccgcttcttgccggcgaccccggttcgcatgctgctggataaaaacggcaacaacctcgccgcgcaggtggagttcgaaagcttcaaccgccagctgagcgcggtcaaccgccataccggtagcaaactggtcaacgcggtgcagcaggacgttcacgcgattctgcaacagggcgaagcgcagatagccaaagcggcgcaggcgctgatcgacgcggcgcgtaacgaagccgatgataaactgacggcggaactgtcgcgtctcgaagcgctgaaagcggtgaacccgaacatccgtgacgacgaactggcggcgattgaaagcaaccgccagcaggttatggatgcgctggcgcaggccgggtggcgtctggacgcgctgcgtctgatcgtcgtcactcaccagtaacggaacgcgaaaatggcgatggaaaactacaatccgccgcaggatccctggctggtgattctgtatcaggatgagcacattatggtggtcaacaagccgagcggcttgttgtccgtgcccggcaggcttgaggagcataaggatagcgtgatgacgcgtatccagcgcgatttcccgcaggccgaatcggtgcatcgcctggatatggccaccagcggcgtgattgtggtggcgctgaataaggccgccgagcgtgaactgaagcgtcagttccgcgagcgcgagccgaaaaagcagtacgtcgcccgcgtctggggccatccgcagcccgcggaaggtctggtggatttaccgctgatttgcgactggccgaaccggccaaagcagaaggtgtgttatgaaaccggcaaagcggcgcaaaccgagtatgaggtgctggagtacgcggaggacaacaccgcgcgcgtgcgcctgaagccgattaccgggcgctcgcatcagcttcgcgtgcatatgctggcgttagggcatccgatcctcggcgaccgcttttacgccacgccggaggcgctggcgatggccccgcgcctgcttctgcacgccgaaacgttaaccatcacccatcccgcatacggcaacgcgatgaccttccgcgcgccaatcgacttttaagtcgttatccgaacgccccggtcgcgctacgccgccggggaatttctcacgctaacgcgattaatcgcgggcaaaccacgcatcaatcatttgctcaacgcgagcgaccaccagcccggtgtcgtgacgacggctgcgcgcgcaggcgtgggccggctcatcgcacagcaggcagcggcgcatcgcttcgccctgcgcctggcggctaatcagccccccttgcggacaaatgacgtcgatatcccacaggcgacccagaggatgattctgttccagttcgctgcatagcgctttgacctcttccgcggagtgctcaacgcaccacattgcttccgggccggtaggcagccacaacacctggcggtcgagcgttttccaacgctgctgccacagaagttggtcacaggcctgcagcgcaacccccatcatattgcgatagcgaatactgtcttttaccgcccctggcgttaccagggtgagagaaataaccggttgttgataatggttgagccagtcttgttgacgggctgcgcgctgctctttcgccgccagcagattttccatgctgacgcccgcccgggcgggagtatgcactgacattctttcctctcctttaatgatcaaaaaggcagcgcggggctgccgtcgctatcgcggataacgccgcctattgtatcgctaattgcacagaatttaggacgcaggacaaagaaattttcttcgtcctgcggagggaaatggcagtttttgctgttagcgcagcactaaatcacgataagaaatgacttaagaacagcagccctaacgacacattaatcgcgccgccgatacgggtggctatctgggcgaagggcatcaggttcatacggttgccggaagtcaggatcgcgacgtcgccggtaccgccctgcccgctctggcaacaggagacaatcgccacgtcgaccggatgcatccccattttcttgccgacgaagaacccggtggccaccagcgccgagacggtgcagacaatgaccaacaggttggtcagcgtgaaggcgtttaccagctcctgccacggagtaatcgccacgccgacggcaaacaaaatcgggtaagtcaccgcggtacggaagaatttatacactacctgcgagccctcctgcaggcgcggcgaaaccacattcgccagcttcagcagcaccgcgaggaacagcatgccaaccggcgccggcaggccaatcaatttatgtccgagcatgcccatcatatacagcagcaccgccagcagcgcgccggaggccagcgtcgccacatcagttttaccgccaaatccttcgctttcgctcaggctgcgggtttcattactgcggttcggcattagctggccttcgccggtcagatgcgggaagcgcttaccgagctggttcaaacagccggcaatgacgatcgccgtcaggctgcccagcatcaccatcggcagcacacgtccaagcgcaacgccctgatccatatgcatcagcgccgcatagccaatcgacagcgggatcgccccctcgcccacgccgccggccataatcggcagcacgataaagaagaagacctggaacggatccattcccaacaggctgccaacccccacgccaaccaacatgccgacgacttcgccgcacagcatcggcaggaagatcttcaggaacccctgaatcagcgtggttcggttcatgctcataatgctgccaacgataatgcagcagatgtagagataaagaatattggtcgatttatagaatttggtggtggattcaaccaccacatccggcagcaagccgtaatggaccagcgcggaaggaataaaggtggcgcaaatcgccgccgcgccaagcttgccgagtaccggaaggcgcttgccgaactcgccgcaggcaaaaccgaagaaggccagcgtcgccaccatcaccacgatatcgctcggcagcttaccgccaaggcaatccagcgcgataagaccgccggccagcaaaaatagcggcagcgggataatccccactttccagctatccatcacgtgccaccagcgctgcttcaacgtggctttcggtttgttaataggttcaagggttgcagagaatgcgttgtctgtggtgctcataaattcagccctgtagttattattcctgttcagggtagaggggtgagcacggcgttaatgtgagaaaaggcagattaaaaaagaagttttaatggtcattatggtttttatggtttctattgatcatcgtgatacatatctgatttctaaacgtggtttttatggtttttttaataaccggataattaccctttataaataggcgccagtagataaattgtccttctggccgctgacgatatcgttgccgcatctcaaatactgtgcgcataactatgaaagtttcatttcaatttaagctgttcatctccctggtggcctttttctccatcttattcgctttgcttggcgtttattattatctcgacgccagccgccagctgtatcaggaaatgagcgccagggcgaaaattcaggccgaagagattgcgctgatgcccaatctgcgccagcaggttagcctgcacgatccccatgctatcggcgtcttcatgaagcaaatcgccgtccacagcgacgccagctttatcgtcatcggtgatgataaaggcgttcacctgtttcattccgtacacccggaatgggtcggcacgcgcttagtgggtggcgataaccaggcggtgctggaaggcaaaactatcaccaccatccgtaaaggcggtttgggcgtctcgctacgcagtaaaacgccaattgtcgatgataacggacgggtgatcggcatcgtctccgttggctatctgaccagctatctcgacagcattaccgtgcaaaaggtggtgaatatttttgtcgccgccattttgttgttgatcgccctgtttatcttctcctggtattttacccgcagtattaaaaaacagattttttcgctggaaccgcgcgaaattggcctgctggtgcgccagcaaaaagcgatgatggaatcgattttcgaaggggttatcgttatcgacagccaacgaagaattgaagtgattaaccacgccgcccgcagcctgctgggacttaagcagcccgcgcatctgctgcgcggcaaatcgattgatagcgtgatcgccccgcagccgttcttcgccagcggcgcaatgctggcgaatgatactcacgatgaactgtgtcgctttaaccagttgacggtactcgccagtcgggtacgcatcatgctggaaaactcgctacagggctgggtgatcaccttccgcgaccgcgatgaaattaacgccctcaccgctcaactcagccaggtaaaacgctatgtcgataacctgcgcattatgcgccacgaacagctcaaccgcatgaccacgctatctggcctgctgcatatgggccactacgacgaagccattcgctatatacaggcgcaatcggaacatgcgcaggaactactggacttcatctcctcgcgcttccgctcgccaacgctatgcggcctgctgctgggtaaagccacccgcgcctatgaaaaaggcgttgagctgagctttgatccggcctgccgtatcgatcgcccgctgtcgtcgctgatggaatccgaacttatctcgatcatcggcaatctgttggataacgccattgaagccacgcaacgcgccgaactaccgcacgagccggtagaagtactgattcaactcaacgcccgcgagctgatgattgaggtggccgatcgcggtgtcggtatccgcccggatatccgcgaccatatttttgagcgtggagtgacgacgaaaacccgtggcgatcacggtattggtctgtatcttattgaacattatgtgactcaggctggcggcacgattgaagtcgctgataacacaccgcgcggaacgatatttaccctatttatacccgccgacccgccagcctatccgcaaccggaggccaacgatgcatcatgatctggtcgatgtgctgatcatcgaagatgaaaacgagctggcccgcctgcacgccgagctcattcagaaacacccgcgcatgcggctggcgggaacggccgcctcgctttcccaggcgcggcagatgctcaacgccaggccgccgcagctggtcctgctggataattatctgccggacggcaaaggcgtcacgctgatgaccgatccgattctggccaacgccaattgctcggtcattttcatcaccgccgccagcgatatggaaacctgcagccaggcgatacgcaatggcgccttcgactacattctcaagccggtttcgtggaaacgtctaagccagtctctggagcgttttattcagttttacgaccagcagcgggaatggaaaatcgtcgatcagcaaaacgttgattccctgtatcaactacaggccaaaaattttcgcgccgataacggcagcaagggcatcgaagaaaaaaccctggcgctggtgcaaaatttatttcatggtcgcgaaacgcactgcttttcagtggacgaagtggtcaacgaaaccggactgagcaagaccactgcccgtcgttatctcgagcactgcgtagaagtgagttttctggaagtggaaatgctgtacggtaagattggccacccgcggcggatgtatcgccgcgcgcagggtgcgaactaaggcctctccccgcaggagaagccttacgggattcagaagccgcgctgctctttgatgagctcccaggctttctggatctcctgcgctttctgcttcgccatttccatcatctccggcggcagccctttggccaccagcttgtccggatgatgctcgctcattaatttacgataggcgcgcttgacggttgtggcatcatcggtcggtttcacgccgagcacgttacaagcgtcttcaagagtcgggccgcgttgcgcctgctgccagccgccattgccgccgcgctgaccataggattgctgctgcgaaccgccgccgaactgcgcgccgccctgcatcatacgcaggaactgttcgaactgcgcgcgcgagataccgagctcatcggcgataacaaacaacacttcgcgctcattgggatgtaattcgccgtcggcgaaggccgcctgcagctgaatttccagaaacatcctaattaaatcgaagcgaccgaaacagacgctgcgcagctgacgcattttctcgcgcagcggataattatcggccttgccggcgcgaaaagcctgctgcgccgcggtgcgcgactcgccgtgtagattcatacgatccatcagcgcgttagccacatgaatatcggcttccgtcacacgccctttagatttagtcagatgccccatcacttcaaacgtggtggaaaagaacagcgactgccgctcctgctggttggcaaataaattcagacgacggctacgagcgcggtcaaacatatgccccactaataagccaagcaccacgccccagaagccgccgcccatcaataatgcaaccgcgacaccaatcactttacccaaatactgcatagactccccaatctttctgctacccgttaagctatatatgaccgcacgttaccaagcgctgacgccacggtcatgtgggacatcgcctataatttgctttatcatactcgccattctacacggtgcctaacgctcagaaacgaaacgagcggataagactagcgcgattaagatgagtacgttaggctctgaccgtttgcaagccgctgccacaagatgacggaacaacaaataaaacgtatgaaaaaacgtatccccagcctcctggccaccatgatcgccagcgccttgtatagtcaacagggcatggccgccgatctcgccacgcaatgtatgcttggcgtgccaagctataatcgtcctctcgttgaagggaagcctaacgatcaaccggtgacgattgacgccgatcatgcgaaaggcaactaccccgataatgccgtgtttaccggcaacgttgatattaatcaggggaatagtcgcctgcaggccgacgaggtacagttgcatcagcagcagccggcgggacaaccgcagccggtgcgtaccgttgatgcgcttggcaacgttcattacgacgacaaccaggtcattctgaagggaccaaaggcgtggtcgaacctgaataccaaggataccaacgtctggaaaggcgactatcagatggttggccgtcaggggcgcggtaccgccgacctgatgaaacaacgcggcgaaaaccgctataccattctggaaaacggcagctttacctcttgtctgccgggttctgatacctggagcgtcgtcggcagcgaggttatccatgaccgcgaagagcaggttgccgaaatctggaacgcacgcttcaagcttggttccgtccctattttttatagcccgtatctgcagctcccggtcggcgataagcgccgttccggcttcctgatccctaacgccaaatacagcaccaaaaatggcgtagagttctcgctgccttattactggaatatcgcgccgaacttcgacgccacgattacgccgcactatatgaataaacgcggcggcgtcatgtgggaaaacgaattccgctatctgacccaggcgggagcgggtttatttgaattcgattacctgccgtcagataaagtgtacgaagacgatcactccaacgacagcaatagccgccgctggatgttctactggaatcacagcgcggttatcgatcaggtgtggcgcctgaacgctgactacaccaaagtcagcgatccggattactttaacgactttagctctaagtacggttccagtaccgacggctacgcgacgcagaaattcagcgccggttacgttaaccagaactttgacgccaccgtgtcgaccaaacagttccaggtcttcgaccgtagctcaagcaactcctacgctgctgagccccagctcgatattaatgcctaccagaatgacgtcggtcctttcgatactcatctgtatgcgcaggcggtgcatttcgtcaacaccaacggcgatatgccagaagcgacgcgcttgcacatggagccgacgatcaacctgccgctgtctaacggctggggaagcatcaataccgaggcgaaactgctggcgacccactatcagcagagtaacctcgatcagtacaacaccgctaacggtaccgattacaaagattcggttaaccgcgtgatgccgcaattcaaaatcgacggcaaaatggtcttcgagcgcgatatgcaggaagggtatacccagaccctggaaccgcgcatgcagtacttgtacatcccgtatcgcgaccagagccatattggcgtctacgactcgacactgttgcagtccgactatagcggcctgttccgcgaccgctcatacagcggtcttgaccgtatcgcgtcagccaaccaggtcaccaccggcgtcacatctcgcgtatatgatgacgcggccgttgaacgttttaatatttccgttggtcaaatctactatttcaccgagtctcgtaccggtgcggacaacatcaactgggagaataacgacactacgggttcactggtctgggccggcgatacttactggcgcatcaccgataactggggtttacgcggggggatccagtacgatacccgtctggataacgtcgcaaccggcaacggaaccattgaataccgccgcgacgaaaaccgcttagtgcaactgaactaccgttatgcgagtccggaatatattcaggcgacactgccttcctattccaccgctcagcagtacaaagaaggtatttctcaggtgggtatgaccgccagctggccgattgtcgatcgttggtcagtggtcggcgcgtactacttcgacaccaataccaaaaaagcggctaaccagatgttaggggtgcagtacaactcttgctgctacgctatccgccttggctacgaacgtaagatcaacggctgggataacaacaacggcggcgagagcaaatacgacaacaccttcggtatcaacatcgaactgcgtggtctgagctccaactacggacttggtacccagcagatgctgcgctcgaacattttgccgtaccagagctcactgtaaggcgtctggtttaaaacgtaatccgcatttgcggttaattgaaatggaaaaagtatgaagaactggaaaacgctgcttctcggtatcgccatgatcgcgaataccagtttcgccgccccgcaggtggtcgataaagtagcggctgtcgtcaataatggcgttgttctggaaagcgacgtcgatggtctgatgcagtcggtgaagctcaacgctggtcaggcgggacagcagctgccggatgacgcgaccctgcgtcatcagatccttgaaagattgatcatggaccagatcgttctgcaaatggggcagaaaatgggcgtaaaagtcagcgacgatcagcttgatcaggccatcgctaacatcgccaaacagaacaatatgtcgatggatcagatgcgtagccgtctggcctatgaaggcatcaactacaacacctaccgtaaccagatccgtaaagagatgctgatttcggaagtgcgtaacaacgaagtgcgccgccgcatcaccgtgttgccgcaggaagttgaagcgctggccaagcagattggcgatcagaacgatgccagcaccgagctgaacctgagccacatcctgattgcgctgccggaaaacccgacctccgatcaggttgcggctgcggaagagcaggcgaagtccgtcgttgaacaggcccgtaacggcgctaacttcggcaaactggctatcacctattccgctgaccagcaggcgctgaaaggcggccagatgggctggggcgtattcaggagctgccgggtattttcgctcaggctctgagcaccgcgaagaaaggtgatgttgttggtccgattcgttccggcgtcggcttccacatcctgaaagtgaacgatatgcgcggcggcagccagaatatctccgtcaccgaagttcatgcccgtcacatcctgctgaagccatcgccgatcatgaatgacgcccaggcccaggcgaagctggagcagattgcggcagacattaagagcggtaaaacgactttcgataaagcagcgaaagagttttctcaggacccgggctccgccaaccagggcggtgacttaggctgggcaacgccggatatcttcgatcctgcgttccgcgatgcgctgatgcgcctcaacaaaggccagactagcggcccggttcactcctccttcggctggcacctgatccaactgatggatacccgcaacgtcgacagaaccgacgccgcgcagaaagaccgcgcttaccgcatgctgatgaaccgcaaattctctgaagaagcggcaacctggatgcaggaacagcgcgccagcgcctacgtgaagattctgagcaactaaagttctcccctctccatgtctttaaggcatagcgggagggtagaccggtcgccccagcaacggctggggtcgactgcgcagccgggccaccctggcccgaaggaacgtttctatgcaacgtgttgttatcactcccggcgagcccgcggggattggtcccgatcttgtcgccgagcttgcgcagcgcgactggccggttgaactggttatctgcgccgatggcaccctgttaactgaccgagcccgccagctcgatcttcctttatcgctcatcccttacgatccctcacgtctgccgcaacctcagcgggcgggcacgctcacactgcttcccgtcaccctcaacgcgccggtacagccgggcgtgcttaatgtcgataacggcagctatgtggtggaaacgctggcccgcgcctgcgatggctgccttaatggcgaattcgcggcgctgattaccggcccggtgcacaaaggcaatatcaatgacgccggtatcgcctttaccggtcataccgagttctttgaagagcgcgctcacgccagcaaagtggtgatgatgctggcaaccgaagagctgcgggtcgcgctggccaccacccacctgccgttaaaagcgataagcgaggcgattacaccggagctgctgcgcgaagtgatcgccatcctggatgccgatctgcggcataaatttggtatcgctcatccgcacgtgctggtttgcggcctgaatccccacgccggtgaaggcggccacatggggacggaagagatcgataccatcattccggtgctggaagagatgcgggcgaagggcatgaatttaagcggtccgctgcctgcggataccctttttcagccaaaatatctagataatgccgatgcggtactcgcgatgtaccacgatcagggtctgcccgtgctaaaataccagggctttggccgcggcgtgaatattacgctcggtttaccttttattcgtacctccgttgaccacggtaccgcgctggaattagccggtcaggggaaagcggacgtcggcagttttatcacggcgcttaatctcgccatcaaaatgattgttaatacccaatgaataatcgagtccatcagggccatttagcccgtaaacgcttcgggcaaaactttctcaacgatcagttcgtgatcgacagcattgtctcggccatcaatccacaaaaaggccaggcaatggtcgaaatcggcccgggtctcgccgcgctgaccgaaccggtcggcgaacgcctcgaccagttaaccgttatcgagctggaccgcgatctggcggcccgcctgcagacgcatccgttcctcggtcctaagctaaccatttaccagcaggatgcgatgaccatgaacttcggcgaactgtcggagaaaatgggccagccgctgcgcgtcttcggcaacctgccgtacaacatctctacaccgctgatgttccacctcttcagctatactgatgccattgccgatatgcattttatgctgcagaaggaagtggttaatcgtctggttgccgggccgaacagtaaagcgtatggtcgattaagcgtaatggcgcagtactactgccaggtgatcccggtacttgaagtcccgccgaccgcctttacgccgccgccaaaagtggattccgccgtcgtgcgtctggtgccgcatcgcactatgccctatccggtgaaagatatacgcgtgctgagccgtatcaccaccgaagccttcaatcagcgccgtaagaccattcgtaatagtctcggcaatctgtttagcgttgaagtgctgacggagctgggcgtcgacccggcggtacgtgcggaaaatatttctgtagagcagtactgtaagatggccaactggttatcccacaatctgccttcgaaggagagctagccatgattaattcgcctcgtgtttgcgtccaggtgcaaagcgtctatatcgaatcgcaatcttctccggaagaagagcgctacgtcttcgcttacactgtcaccattcgcaacctggggcggagtcaggttcagcttctcggtcgctactggctcatcactaatggacacggtcgcgagacggaagtccagggtgaaggggtggtcggcgaacagccgcacatccctgccggcgaagagtatcaatacaccagcggcgcggttatcgaaacgccgctgggcacgatgcagggtcattatgagatgattgatagcaacggcgtaccgtttaatatcgagatccctgtcttccgtctcgcagttccaacgctaatacactaaaaaatggctacataccttattggcgacgttcatggttgctacgatgaactgatcgcattgctggagcaggtggagtttaaccctgatacggacacgctgtggctcaccggcgacctggtcgcgcgcggccccggctctctggaagtgctgcggttcgtgaaaacgctcggcgatagcgtgcgcatcgtgctaggcaaccatgacctgcacctgctggcggtatttgcaggcattagccgcaacaagcccaaagaccgtctgaccccgctactggaagcgcccgacgctgacgaactccttaactggctacgtcgccagccgttgatgcaggtggacgaagagaaaaagctggtgatggctcatgccggtatcacgccgcagtgggatctggaaaccgccaaacagtgcgcgcgcgatgttgaagccgtgctggccagcgactcctatccgttcttcctcgacgcgatgtacggcgatatgccgaaccactggagtaatgagctcagcggcctggcgcgcctgcgctttatcaccaacgccttcacccgaatgcgctattgcttcccgaacggccagttggatatgtacagcaaagaggcgccggaagacgcgcctgccccgcttaaaccatggtttgctattccgggcccagtcgctcgcgagtacagtatcgcctttggccattgggcgtcgttggaaggtcgcggtacccagaagggatctatgccctggataccggctgctgctggggggggacctgacctgcctgcgctgggaagataaaacgtatttcacccagcgttcaaaccgccagaaaagcctcgacgaaggtgaagcggtcgcctcctgagtcgatcccggatggcggcgcgctgcgccttatccgggctacctccggtacgggagattcctgataaaacaaaaccccggtcacgcctgacgcgaccggggttttttatccatgctagttagcttaacggcgttcgaggatctcgaagcagtagctgtgggagttttgcgcatcggcatcgtggaactcgctgaacaccgattcccactcgtccggatcgtaatccgggaaatgggtatccccttccacttccgcatcaatatgggtcaggtagagtttgtgcgcttttggcaagaactgctcgtaaacgcggccaccgccgatcaccataatctcttccgcgtcgccgcaggcggcaatcgcttcatcaacagacttcacccactgcacgcgatcgtcgctacctggcttgctgctgataacgatatttttacgtcctggcaacgggcgaccgatggattcccaggtcaaacgccccattaccaccggcttgtttaaggtgttacgtttaaaccaggcgagatcggcaggcaagtcccatggcatagcgttctccatgccaattacgcgatctacagctaacgccgcaatcagactaatcattgaaaatatcccgaatgcaaaaaattgccgccactatacggaaagcgtaatacttcgtcgactgaacgaagagtaaagaataagaaaatttttagatttgctggcgagcccacgtaaccctcatgagccgccagatcaggaactaaattgaaaacaaaatgttagctgtaaagttaacgcaacatctgcttaccacctcaggttgaaggcttattctccggctcatcacgaacgtctccggtgtgccgcccttcttcagtaccttgccaaccgtggcgctgcaccagcgacaaatgattacggtcctcgttgatgatgccggtaagcatatcgctggtccgtttaaataccgccacccgcgaagcggcatcattttccgccatcgccaccatctcttccaccatctgctggttgaagcggcggaataaatcggcacgctcgcgggcctcataagcaccaaggcccagggcttccagcgtcatgcgaccgcttttcagcgccgattcgaaggtctcacgctccggtgcttccaccccggcctggcgcagctgaatgtagtgatcgacatcgcgggcgcgcgaaatgatctgcagatgcgggaagtgctctttcgccagctccaccaactgcaggctggcctgcggatcgtcgatggcgttaatcagcacttctgcctttgccgcccctgcagactccagcaggtccacacgcgtagcatcgccgtaaaacaccttcatatcgaatttgcgcagggtatcaacgtggtccggatcgtgatcgaggataaccattttcacgccactggaaagcagcacacggccggcaatctgcccatagcggccaaaaccggcgataatcactcgcggctgctcttcgtcaatctcatccgcttcgcgctcctggccgctggcggatttctccatccgcgtcagcagcacgagcaggattggcgttgccgccatcgatagcgccaccgccagcgtcaacgccttcgcccactcgctatccaacacatcggccatctgtgcggcgccgaagaccacgaaagcgaactcactcccctgccccaacaacacggcaaaccagcggcgctgcgcgcgcggcactccaagtggtttagcaatcagccatagcatcagagccttaatcgccaaaaaacccaccagcaggatcaggatacgtagcggatgggtgacgagggtgccgaagtcaatagacataccgacgccaataaagaacagccccaacagcaaccctttaaacggttcgatatcgctctccagggcatgacggtattccgaacttgccagaagcaccccggcaagaaacgcgcccatcgccatcgacagtcccacttcttccagcagcaatccgaagccgaacaccaggaacaaggccacggcgctgaatacttcgcgcaggccggaacgggcaacgaagcgcagtaccggccgggtcagatagcgccctaacagcaccaccagcgccagcgcgccggcgactttcaacgccgacagcgcaaacgcggccagggtcgttgagccgccgctggccgccagcaacgggatcatcgcaaccaaaggaatagcggcgatatcctggaacaacagcacggcaaaggcgctacgccccagttgcgtcaccgtcaggttacgttcattcatcgcctgcatcgcaatcgccgtcgacgacagcgccagcgtcatcccgatcagctccgcaacctgccagcgcaagccaagcagcatgcagaacagcccgataaacgcgccgcacaccaccatttgcagcgcgccgccgccaaacaccgaggcgcgcagcttccataagcgctgcggatccagctcaagaccgatgacaaacagcatcagtacgacgccgatttcggcgaaatgcagaatcgcctctgcgtcagtgaccagtcgcagtccccacgggccgataacgcagccggcgatcaaataccccagtaccgaccccagccccagacgcacggcgatcggcacgataagcgcagcggagccgaggtagatcagcgcctgtattagcgtatggctatccattgttatgcgcctcctgccattcgattaagcgttgacgataatgacgggcctgcgcctgtagcgtttcgtcatcgcagataaaggtgcagtgcatggcaaacggcggcagccatttcatgccacagtacagcgccgtcgcctgcagaggctgcgccagcacgtcaaagccagggaatgaaccaatatcgaaatggctttcgccgccgccggtagtaaccgcccacatcagcgatttaccatgcaacgcaataccattgtggccgtacgcccagccgtgagacagcactttatccatccacagttttagcagcggcggtacgctgtaccactgcataggatgctgccagataaccagatcggcacgcgccagcgccgcctgctcggcagcgatatcaatattgaagtcgggatatagctcatagagggagcgtatctctacgccatcaagcgtccctgcctgctcaagcattcgcttattcgcatgcgagtgatgcggataaggatgcgagtaaattatcagaatcatgaatgggcctgtcttttgtattcttgtagcagtgagtgtagacagttaactcgctcactgaaagggggtaatgcctgaggagaaatcgatcgcagctaatgataatcctcccatcacaacaaaagtgcaggcttcccagaggacagttggcgcccatttaattccccatgcgaatttatcattagaaataatacagtcactggatattttaaggagagattaaattattctttaataaataaacctatacaccccacaatgtacaaccaataattttacgctcttcattttgagccccaaaattttaaattaaaaacaaaactctaatatatagcgttaaccggaagcgctatttacacaaatggacgtgtatatgagcaacaaacattttgaactaaacaggacaaccaaaacgctggcaaggatatttcccaccttattaatggttacgccaatagtcgtcagcgcagccacaattgaccagtcaacctccgtaccgcaagacttctcggctgataccgaatacgttattaatcgggatgtcaccgtctcatccacggagaacaccccggcagtttccgttagcggaatgaacgtcaaaaaaatcaccaatgatggcaatatttccggaatgggaatcggattggatattaacatcgatgggcaatccgttgaaataaacaataatgaaaatgcaattatttcatctgaaactgataacgccgttaacatgcaatcaatggcgggtacctttaataatagtggcatcattactggcgccaacaacggtattttcattagtgaagagtcatcggcaattagcatcaccaataccgatactggcgtgatcaccgggaaaaacggcctgagttcgcaaattgccgtcggattagataacatcggcgccatcaccggtaccgcaggcgatggtattgcgttaagcgacggcaacagcaaaattaacaacagtgggaccgtgcggggtagccagaacgggatccacgtcgttaatagcgcgaaagccgatatcattaacagtggattacttggtggcggcggcgcggccgtcatgtttgccagcagcaaaaataacagcctggtgctcaataccggctcttccctcatcggcgatgtcatctccacgggctctgcgggtaacgcactctcactggtgggttctggttcggaagacagcaactttgtcggccttaatgacggcgacggctttgcctcaatgaaaatgaacggcgaaaactggacgctcaccggcaacctcgacatcattggcagcggcgattccctccaggttaatagcggccagttaacgctggcgggcgctgtcgcgaatagcggcaacacgctggtagcggaagcggccacgctacagttggggaacgggcagaaaaccgcgaccctcaccggcagcatgaccaacaacggcacactgatcttcaatcagggaagcgactctacgtttgccaccagcatcatcggtagcggcaacgtggaaaaagtcgataccaataccctgaccttaaccggcaccaatagctacaccggtaatacccttctgaaaagcggcaccactctggtcgcggaaggcgctactctcggcgtcgtcggcagcgacgccaccctcaccattgacaatggcgcgcaatttgccagcgcagtcgaagtgaataacaacattgatattctcagtggcggtatcctcgcggcgtggaatgcgattgaaggtaactcaacgttaagaacatccggcgtcgatacgattaacggcaatgtgaccaacagcggcacgctgttactcagcgccgccgataatagcgttggcaacaattttacgattaacggcgactataccggttccgccgacagccaaatcgtgatgaacagccaacttggcgaagacagttcaccgactgaccatctgtccatcaccggcagcagctacggtcagtctggcgtcagcatcgccaatatcggcggactgggcgcgcaaaccgttaacggtatggagattgtcagcgtcggcggcagttcagaagcgcaattaaccttatccaaaccggttgtcgccggggcttatgaatacgacctttataagcacagcaacggcaactggtatctggaatccaaagcaaccccgtctgacgatccgtcggatgatactgacgatggtgacagcggcaccgatgacggaagcggcaccgatagcggcagcagcaccgatgacggcagcagcaccgatagcggcagcagcaccgataacggcagcagcaccgataacggcagcggcaccgatagcggcagcgataccgataatggcggtcaatccgcgccagaagtgatggcgccggaagtcggcgcttatctgggtaactacctcgccgctcagggtatgttcctgcataaacgtgacgatcgcgaccagctcacgttccgcaacgaagacaatctgaacacctggatgtacgttaagggccgctatcatgaaaacgacgccggcggcgataaagtcagctatgacaccactaccaccgtgcttcaggtcggcagtgatttcatgagcaagccaatggacaaagggatactgcgtgccggcggcatgtttggcgcgggccaggcgaaaacagactcggatgcgaaacacaacgtgcgtaacgcgcagggtaaagtcgacggtttcaacgttggcctgtacgcgacctggcaggaagatccgaaattacgtctgggcagctacatcgatacctgggcgtcatacagctggtataacaacacggtcaccagcaatcgcaacaatgaaaagtatgatagcaaaggctttgccgcctctgtcgaagtcggccatgcatgggtgatcccttcagagaatgcgcgtacctggaagattgaacctcaggcgcagatgatctacagctatctcgatcaggaaaatcataccgatccggatggcgtgcgggtaacaaccgtggataacaatagcctgtttggccgtctcggcgtgaagagcagctacttcgagcagcaagatgttaaagcgtggcagccttatgtcgccgtgaactggctgaaaggcgctggtcaaaacgatctggctttcaatggcgaaaaagtcagcaacgatacgccagacgatcgcggtcagttagagctgggcgtaaccggcaatgtgaacgagacgaccactatctcgctgcgcgccagcggcgaatggggtgaaaacagctacgccgcctatggcggtcacattctgctgaatcaccgttggtaatcgccgtacaatgaaagctaaaaagcagtggccggggccactgctttttttttagttatccagctcgtccattgacttcacctgatcgcgattaatctgctccacgcgaccggtttccgcatttttgtaggataccaggcctgtatcatcatcgacctgcggcttaccgctggtcacaattgttttgccatctgtcgttttgagcgactgatttgatgaacaacctgccacaaataccatcgccgttgccgccagcgcggatgccaccagaattttgttccgcattgtatcctcctgtcttttcatcaattggtatcgttatcgtgctaactatagttagcctgacccggcaggcagataaaagcagaactctccgaagatgattaccgtaaaaaaaagggccgacgatatcgtcagcccctgtgtttcgctatccggcccggccggtgcgtttatttggtgatttgcgcgtgcatttcctgcaccgaaatcaccttctcggtcgcatcggcattcagcgccatcgcggtggcgaagccaccgttcagggtggtgtcgtaatgcaccttgtactgcagcgcgctgcggcgaatcagcttggagtcttcaatcgcctgacgtcctgcggtggtgttgatgatgtaggtatattcgccattcttgatacggtcctgaatatgcggacgaccttcatgcaccttgttcaccagacgcgggttgataccggcttcacccagaacaatcgcagtgccgtgggttgcatccagctcaaagccctgtttcagcagttttgccgccaggtcgacaacgcgctctttgtcgccttcacgaacggagagcagcgcgcggccctgtttcttcatcgtggagttgctgcccagctgcgctttggcgaacgcttccgcgaaggtgcggcccacgcccatcacttccccggtagaacgcatttccggccctaacagcgggtcaacgcccgggaatttgttgaacggcagcaccacttctttgaccgaatagtacggcgggatgatttctttggtgacaccctgctgcgccagcgttttaccggccattacgcgtgccgccactttcgccagcggtacgccggtggctttcgacacgaacggcacggtgcgcgccgcgcgtgggttgacttcaatcaggtacacttcgttgtttttcaccgcgaactgtacgttcatcaggccgcgaacctgcagctcgaaggccagtttctgcacctgctcgcgcatcacatcctgaatttctttgctcagagtgtaggctggcagagaacaggcggagtcgccggagtgcacgcccgcttgttcgatatgttccatgatgccgccaatcagcaccatttcgccatcgcagatagcgtcgacgtcgacttcaaccgcgtcgtcaaggaagcggtccagcagtaccggcgcatcgttggagacgctcaccgccgtctggaagtaacggcgcaggtcagcttcgtcgtagacgatttccatcgcgcggccgccgagcacgtaagacgggcgcaccaccagcggatagccgatctcttttgccttctcaaccgcttgctcaagcgcggtcacggtggcgttcgccggctgcttcagcttcaggcggtcaaccgcgtgctggaagcgctcgcggtcttccgcgcggtcgatggcgtccgggctggtgccgataaccggcacgccggcagcttccagttcacgcgctaacttcagcggcgtctggccgccgtactgcacgataacgccttttggcttctcgatacgcacgatttccagcacatcttccagcgtaaccggctcgaagtacagacggtcggaggtgtcgtagtcggtcgaaacagtttccgggttacagttaaccatgatggtttcgtacccgtcttcgcgcagcgccagcgaggcgtgtacgcagcagtagtcaaactcgataccctggccgatacggttcgggccgccgccgagaaccatgattttatcgcggtctaccgacgggttggattcgcactcgtcttcataggtggagtacatgtaggcggtatcggtggcgaattccgccgcgcaggtatccacgcgcttgtagaccgggtgcaggttgtagtggtcgcgcagcttgcggatttccgcttcgcgcacgcctgccagtttcgccagacgcgcatcggcaaagcctttacgcttaaggtggcgcaggaagtcagcgtcgagaccgttgatacccacagccgctactttctcttccaggcgcaccagttcttcgatttgtaccaggaaccagcggtcgatgttggtcaggttgaagacgccgtcgacggagaggcccgcacggaaggcatcagcgatgtaccagatacgctcggcgcccgcgtctttcagctcgcggcggattttggtcagcgcttccggatcgtcgaggcttactttcgggtcgaagccggtggcgcccacttccaggccgcgcagcgctttctgcagagattcctgctgcgtgcggccaatcgccatcacttcgccgacggatttcatctgcgttgtcagacggtcgttagcgccagcaaatttttcgaagttaaagcgtggaattttggtcacgacatagtcgatggacggttcgaaggaggctggagtacggccgccggtgatgtcgttcatcagctcgtcgagggtgtaacccaccgccagtttcgccgccactttggcaatcgggaagccagtcgctttcgaggccagcgccgaagagcgggatacgcgcgggttcatttcgataacgataaggcgaccatctttcgggttcaccgagaactgtacgttagaaccgccggtttccacgccgatttcacgcagtaccgccatcgaggcgttacgcatgatttggtattctttgtcggtcagggtctgcgccggggcgacggtgatggagtcgccggtatgaatccccatagcatcgaagttttcaatcgagcagacgatgatgcagttgtcgttcttatcgcgtacgacttccatctcgtactctttccagccgatcagcgattcatcaatcagcagttcgttggtcggagagagatccaggccgcgttcgcagatttcttcgaactcttcgcggttataggcgataccaccgccggtgccgcccatagtaaaggacggacggatgatgcatgggaagccaacttcagcggccaccgccagagcttcttccatagtgtgtgcaatgccggaacgcgcggtgtcgagaccgattttcttcatcgccacgtcgaagcgacggcggtcttccgctttatcgatcgcatcggcggtcgcgccaatcatggtcacgccgaactctgccagcacgccctgacgctccagctccagcgcgcagttcagcgcggtctggccgcccatggtcggcagcaccgcgtccgggcgctctttttcgataattttacgcacgacttcccagtgaattggctcgatataggtcgcatcggccatttccgggtcggtcatgatggtcgccgggttagagttcaccagaataacgcggtaaccctcttcacgcagggctttacaggcctgagcgccagagtagtcaaactcacacgcctgaccgataacaatcgggcccgcgcccagaatcaggatactttttatgtctgtacgttttggcatggctcttttactcctgattatttcgcggactgacggtattgctcaattaactcgataaagtggtcgaacagcggcgcggcatcgtgcgggcccgggctcgcttcagggtgaccctggaagctaaacgccggcttgtcggtacgatggatcccctgcagggtgccgtcgaacagtgacttgtgggtcacacgcaggttggcaggcagcgtcgcttcgtcaacggcaaagccgtggttctgagcggtaatcatcacgacgttgttatcgatatctttaaccgggtggttaccgccgtggtggccgaatttcatcttaatggtcttcgcaccgctcgccagcgccagcagctgatggccgagacagatgccaaagaccggaatatcggtggtgaggaatttttcaatcgccgcgatggcgtaatcgcacggcgccgggtcgccagggccgttagacaggaaaataccgtccggattcagcttaagcacgtcttctgccgacgtttgcgccggaacgatagtcaggcggcagccgcggtcaaccagcatccgcaggatattgcgcttggcgccgaagtcataagccacgacgtggaacggcagatcgctttccgccttcgcttccggcaggtcgcctgccagtgtccagctcccctgggtccaggcgtaagtctcagcggtcgtgacctctttcgccagatccatgccgttcagaccagggaatgcctgggctttctccagcgccaaatgggcatcaagattatcacccgcgatgatacagccattctgcgcccctttctcacgcagtaaacgcgtcagcttacgggtatcgatatcggcaatggccacgatgttatggcgcttcagataagaagacaggtcctcggtattgcggaagttgctggcaatcagcggcaggtcgcgaatgaccagaccttgtgcgtgtacctgagaagattcttcatcggcggcgttggtgccgacatttccaatatggggataagtaagagtgacgatttggcgggaataggaaggatcagtgaggatttcttgataaccggtcattgaagtattgaaaacgacttccccaaccgccgtgccggttgccccgatggcccgaccgtgaaactgggttccgtcttccagaaccaaaagcgctgacttaatcaaaacaccctccagagaatattcactcactttatttgcatattaattcagacatagatctgaatcaatgcaaatttttgcccgcagaattttggcaaacggcggcattctggagagatgtcgggtaaaagtcaacttaaagcggatatttttaaccttattttacgccactggcgcgtaactggcgatttttacggtaaaaagatcaactaacctggttgagaaaacgcttgcgggcgtggaaaactgtaaaatcagtcgctgaaggagaaaaaagtggaccaaacggtcaaaatttacaatccaataaccataaatcatgagataagtaagatttttaaaccactaaccaataaaaacagctcaaaaaggaaaaataaaaaagggcaataaaatattgccctttgcaatcaattacatattgaatgcaataaccacatcacgatgggtaataatcattataaagcattcagatcgagcacatctttcatgtcaaatagaccacttttcttgcccttcaaccataaagcagaacgaacggcgccattagcaaatgtcatccggctggaagccttgtgggtaatttcgatacgttcaccgatatcggcaaacatcgccgtatgttcgccgacgatgtcgcccgcgcgaacggtagcaaaacctatggtacccggaacgcgttcgccggtatgaccttcacgactgtagacggcgcagtccttcagatctttgttcaatgccccggcgatcgcctcgcccatcgccagcgcggtacctgatggcgcgtccactttatgcctgtggtgcgcttcgataatttcgatatcggtataatcgcccatcaccttcgccgccttctccagcagctttaacagcacgttgacgccaacgctaaagttagcggcaaaaacaatcgcaatttccttagcggcatcggcgattgcctgctttccggcatcatcaaaaccggtggtgccaatgaccattccttttccatgttgacgacagaaagccagatggttgagcgtgccttccgggcgggtaaaatcaattaaaacatcgaaatcatcattcaccgccgccaggctgctttggacggtaacgcctgatttgcctactcccgccagctcgcctgcatcgctacccaccaggcttgaaccttcgcgctccagcgccgcgccaagcgccacgccttccatctgcagcgcagcctgaattaactggcgtcccatccggccgcccgcgccggcgatggccacgcggatttgtgcatcttgcatagctattctcttttgttaacttcacgtgaattgttttcagagtaaccagcccgttgcgtagccgctactcaaaaacaccgataattagaaatttatgacaaacggcggtcgatatcagtaaaaactatatgattgtgccgcgattcggcgtttaagtagtgaaattagggagagagcacagttgcgccccgcccgcgcggtgcgggctaaggcgttgtagtactaaatcaaaaggggaaaagcgcgcctgcgggaaagcggacagaaaccacgttaccgccaacaaatcggcgctgccgcctgggctgagatgccgggcaatcagctcatcgtcaaattgacgcaacgcctccagcccgccgtcagccatgacgccgccctgccacaacagccgctgtgcctcctgctgcacaaagttcaggccggcaagcccgccgcgcgaaaccagattggtgtcatcattccacgccatcagatgcagcaaggtttgcagcaacgccaggttactatcgccggtctcttccatcatgcggttgaacaccggcagcgcctgggtacgcacggtacgaaagccgctctcggcctcgccgcgggcgccggagaggccatagcgtagaaaatgggcttcgcctttgcttaactgttcgccgctggaagcggagagttcttgcataaccatgccgcgacagaatcgcgccacctggtcgcacagccgatgctgttcaatcggctcgcctttcgacaccagccttcccgccgccgcgctcagcaaaccgaaagcgaagatcgctccgcgatgggtattcaccccgccggtcgcctccagcatatcgttctcgcaggccattcccaccggacgcagcatcattagcacctgttccggcacgatcgccgcggtatcgtggcccatgatgaaaaatttctccatccacggcgccaccaccgcggtgctggcctcaaacgaggccagatccatatcgtgatgggcgccagcgttacgaatatccactaacccgggctttggagtcagacgaacttcggtcaacaacgcgcgctctaccgcgctgaccacctctgcggcgctcagcggtttcacgcgtagcgaacgcgacggattgattaacacttcgctcatgcccttcccctctgcgtttagtcgctgtgtttcacctgacgaatcacatcgagtacggaaccatcgcggtaacgcactaccgccaccacccgatcggtaaactcgatcggctgcggcttaccggttagcagttccgcgcgctgctgcagttgctcaatagtcatcagcggaatgcccgctttgcgcaaattatcaatcagatcctggcgtgccgggtttaccgcaatgccgtggtcggtgaccagcacatctacgctggctcccggcgtgacgcgggtcagcactttttccacgacgcagggaatacgaccgcgaactaacggcgcggtaatgatagtcagatccgcgccggcggcggtatcgctatggccgccggaggcgccgcgcagcacgccgttagagccggtcatcacgttgacgttaaagtcggtatcgatttccagcgcgctgagcatcaccacattcaagcgttcgcaggaggcgcctttagagcccgggctggcatactggttggtagagatctcaacgtggtttgggttctgcgccaatgaacgcgccgcatcgccatcgaacgactgggtatcgagcagcgttttaatcaaccctttttcgtgcaggtcaaccatggtcccggtgatgccgccaaggccgaagctggcggtaatgccgttacggcgcattttgtcttcgaggaagcggctcaccgccagcgaggcaccgccggtaccggtctgcagcgagaaaccgtctttaaagtacccggaatgctcaaccacttttgccgcctggcgggcgatcagcagctcgcgcggattgctggtcagacgaatggcgcctgcggtaattttttccggatcgccgacttcgtccacctggactatcagatctacctgatcctgggcgatactggccgggtagttaggataatccacccactcttcggtcagcagcaccacgcatttggcatgttccgcatcaacgcgcgcgtagcccaatgaaccgcagcgtgatttaccgctaaagccgttggcattaccaaactcatcgcagcaaggaacgccaagaaacgcgacatcaatcgacagctcgccgctttgaatcagctgtacgcgaccgccgtgggggtggatctgcaccgggttttccatcaagccggcggagatctcctcgcccagcttaccgcgcaggccagaggtgtagatctggcggatcacgccatttttaatatgctcgatcagcggccagtgggcgtcgatcagcgaactggacgccagcgtcagatcgcgaaagcccatttccgccagcttcgccactaccatattgacgactttgtcaccaccgcgaaacgcgtggtggaatgaaatggtcatgccgttttgcaagccagaacgacgaatcgccgtttccagcgaatcacagattttacgctgacgtttttcgctttcgctggccagccacggacttttcgccgtcacgcccgcataaggcgctaatccttccggcatgacgtactgctgattaagcattgttactgtctctttcatcttattccccttaatcacgaataccggaagccgagagcgccaccactttgcgagcgtggtcgataatcggtccatcgatcatcttgccgttcagcgataccacgccaagaccgcgcgtttcggcttcttccgcggcggcaatcacttccagcgcgtggtcgacctctttgcgcgtcggggcatagacctgatgcaggagttcaatttgtcgtgggttaaccaacgatttgccgttaaagccgagatttttggccagattcgcttccgccaggaagccctcttcgttgttgatatccgaccacaccacgtcataggcggcgatgccggcaacgcgcgcggcatgcagcacggcgcagcgggcatagaacagttcagtaccgtcgccgcgggaggtgcccatatccatgacgtaatcgaaagccgccagcgcaatcgccgccagacgcgggctggcgcgggcaatctccaccgcgttcaccacgcccagcgccgactcgatcgccgccattaatttggtacttcccacttcccggccgcactcgcgttcaatccgctcaacgtgcgcttccagttcatgaatatcttctttactgtcggttttcggcagacgcaccatatccacgcccgcgcggactaccgcttcaaggtcggcaagaccaaacggcgtattcagcgggttaatgcgcaccacggtttcgatatcctgatacagcggatgctgcagcgcctgatgcaccagcagacgagcggtatctttttcgcgtagcgaaacggcatcttcaaggtcgaacatcaccgcatcggcgccgtaaacgaaagaagtgcttaacatggcggcattggcgcctgggatgaacagcatgctgcgacgtggtttcatagctggctccattgtaattgggactgttgcgccgcgcgcagcgccgcggcctgtacgcgggcccgcagtacgcactccagcgcgcctttatcatcgaccaccacgttggcctgcttcacgccaagctgcgccagcgtttctctcaccacctgctcaatcgcagcgccaaactgttgtttcacaatgctgtcgatttccaactgaatgcccggctgcgccgccggtccaatcctgaccatcacatcgctggactccagcgtgccggccagggcgtcaatcttcatttccataggggaaaatccttagttagggcataaaaatcaggcggtttgatgttcgctttccgccagttgcatcagaaaagagagcgttcccggcggaaccagcgccgcgaccgcctgccagttgcgctgccgatagagttcacgtactcgcgaggccgacacgggtccgccatttttttcgatgcgcgccagctcaaccacttcaacaggcggcgcatcgccaggggattccagcagtgacttcatgcgttggttgtaattccgggtcagggacacaacggctcggtgccgacaaaacgatgggtaatctgcagcgccggggccaggcgctcgcgaaaaagctgaaggtcaatctggctgtggcagtcatcgaccaccccctgctctttcaggaaatagccggggaacgtcgcccgcgagatcagatacgccgaaccggggtgcagcgtcaccttatcgatgccggcaatcccctgttcaatgagtttgaagcgatcgtgataggaaaagcaggacgcatcttctttgaccacaaacagatgcagccagtcgcactggctggccgcctgttccaccaaccagcggtgaccaagggtgaagggattggcgttcatcacgatagcgccgatttttcttcccggctgacggtacatcgccagctgtcggcagtaacgagtcagtcgttcgcggctattttccattagcacggcgcggtcgcccgcctgggctatcggccagaagccggcgccggaaaatagcgcggcattacagggtttagtgaataaaaacagttcgctgcgccccagttcataggccagcgtcaggagctcggtcagtaatttaaggctcagcccttccccctgcagcgagggatcgatggcaatacatttcagcacattgccggcaatagcaccgcagccgaccagccgctgttgatactcggcgacgatcgccatttcacagtcggcttctaacgacagctgatgctggcgaagaaaccgatcgatcgcttctctccgcggtttatcttttaatagctgaacgcgttttaatatcagagtcatttttagcgcttcgttattccaaaacgaactgtattttcgccagcgttcggctattgatacttgtatttaagtcacagttttccccgtggcttaattggctttatggtttttatgttgttaattaattcagcatcattaaaccaattaaattaataaaaaacacgagtattcagtgaaggtaatcacaccttaccactgaggctatttattactatgcgccggtattactactccatcaataaacaggaaaacgtttatgactaacatgagtcaggctccggcgacggagaaaaagggcgttagcgacctgctgggatttaaaatcttcggtatgccgctcccctttacgcgtttgcgttaattacgctattactttcacatttttataacgctttacccaccgacatcgtcggcggttttgccatcatgtttatcatcggcgctatattcggtgaaattggcaaacgcctgccaatattcaacaaatatataggcggtgctccagtaatgattttcctggtagccgcctatttcgtttacgccggtatttttacgcagaaagaaatcgatgctatcagcaacgttatggataagagtaacttccttaacttattcatcgcggtattaattaccggagcaattctgtcggtaaaccgccggctgctgctgaaatcactgctcggctatattccgaccatcctgatgggcattgtcggcgcgtctattttcggcatcgctatcggcctggtgttcggtattccggtggatcgcatcatgatgctgtacgtcctgccgatcatgggcggcggcaacggcgcgggcgcggttccgctgtcggagatctatcactccgtcaccggtcgttctcgcgaagagtactactcaaccgctatcgctattctgaccatcgctaacatcttcgccatcgtctttgccgccgtcctcgatatcatcggcaaaaaacacacctggatgagcggcgaaggcgaactggtgcgtaaagcctcgttcaaagtcgaagatgacgagaaagcgggacaaatcacgcatcgtgaaaccgccgtcggtctggtgcttgccacaacctgtttcctgctggcgtatgtcgtcgcgaagaaaattctgccaagcattggcggcgtttcgattcactacttcgcgtggatggtgctgatcgttgcagcgctgaacgcctccggcctgtgttcaccagaaatcaaagccggcgccaagcgtttgtctgatttcttctctaaacaactgctgtgggtgctgatggtcggcgtcggcgtctgctacaccgacctgcaggaaattatcaacgccatcaccttcgctaacgtcgttatcgccgccattatcgttatcggcgcagtgctcggcgcggcgatcggcggctggatgatgggcttcttcccgattgaatcagcgatcaccgctggcctgtgtatggctaaccgcggcggttccggggacctggaagtcctttccgcctgtaaccgtatgagccttatctcttatgcacaaatctcctcccgtttgggcggcggtattgtgctggtcatcgccagcatcgtgttcggcatgatgatttaacccacacgcacgatggcgccgttgagcggcgaagaagttgacccagtcagggaccagcgccggggcggctgcgggaaatccaccctgctccttagccggaagcgtcgacaagctcgccaaccaacgcgccatcgtgcccttattcgagattttttatgactgatgccgttctgttaggcgaaggtttcaccctgatgttcctcggcatgggctttgtgctggcgtttctgctgctgctcattttcgccattcagggaatgtctgtcgccgttaaccgtctgttccctgagccgcctgccgcgcccaaagcggcgacggccgccgtcgcgcccgccgacgacttcgtccgtttaaagccggcgattgtcgccgccattcaccatcatcgccgccttaatccttaattcacggaggaattcatgaccgttgccattaccgatgtcgtcctgcgcgacgcccaccagtccctgttcgccacccgtctgcgcctcgacgatatgctgcccgttgcggctgcgctcgacgacgtcggctaccgttccctcgaatgctggggcggcgccacctttgacgcctgcatccgcttcctcggcgaggacccgtgggtccgcctgcgcgaactcaaacaggcgatgccgaaaaccccgctgcagatgctgctgcgcggccagaacctgctcggctaccgccactacgccgacgacgtggtggagcgcttcgttgagcgcgccgtcaaaaacggcatggatgtgttccgcgtcttcgatgccatgaacgacccgcgcaacatgaaagccgccctgcaggcggtgcgcagccacggcgcccacgcccagggtaccctcagttacaccaccagcccggcgcacaccctgcagacctggctcgacctcaccgaacagctgctggagaccggcgttgactccatcgccatcaaggacatgtccggcatcctcaccccgcatgccgcctttgagctggtcagcgaaatcaaaaaacgctatgccgtcaccctgcacctgcactgccacgccaccaccggcatggcggagatggcgctgctgaaggctattgaagccggcgtcgacggcgtcgataccgccatctcctcgatgagcgccacctacggccacccggccaccgaggcgctggtggccaccctcgccggcacgccgtacgacaccggcctcgatatccacaggctggagagcatcgccgcctacttccgcgaggtgcgcaaaaaataccacgcctttgaaggccagctgaaaggcaccgacagccgtatcctggtcgcccaggtgccgggcgggatgcttaccaacctcgaaggccagctgaagcagcagagcgccgcccaccgtctggatgaagtgctggcggaaatcccccgcgtacgcgaggacctcggttttatcccgctggtcaccccgacctcgcagattgtcggcacccaggcggtgctcaacgtgctgggcggcgagcgctacaaaaccattgcgaaggagaccgccggtatcctgaaaggcgaatacggccacactccggccccggttaacaccgccctgcaggcgcaggtgctcgacggcgccgacgccgtcacctgccgtccggccgacctgctgaagccggagctggccgcgctggaagccgacgtgaaacgccaggcgcaggagaagggcatcacgcttgccgaaaacgccatcgacgacgtgctcaccgtggcgctgttcccgcaaatcggcctgaagttcctcgaaaaccgccacaacccggcggcctttgagccggtgccgcaggtggaagaagccacctctgccgcgccggcaaaagccgccgcctccggcgtctacaccgtggaagtggaaggcaaagccttcgtggtcaaggtcagcgacggcggcgatatcagccagctcagcgccgctgcgccggtagccgctgctgccccggcccggctggcgccggcaccccggtgaccgcgccgctggcgggcactatctggaaggtgctggccagcgaaggccaggcggtggcggaaggcgaagtactgctgattctggaagccatgaagatggaaaccgaaatccgcgccgcgcaggccggtaccgtacgcggtatcgcggtgaaatccggcgatgcggtggcggtcggcgacaccctgctgcagctggcgtaaggacgaggagcgcaaatggaaagtctgaacgccctgattcagggcatggggctgatgcacctgggggccggccaggcggtgatgctgctggtcagcctgctgctgctgtggctggcgattgctaaaaagttcgagccgttactgctgctgccgattggcttcggcggcctgctctccaatatcccggaggccgggctggcgctgagcgcgctggaaaacctgctggcccatcacgacccggtccagctggcggtgattgccgcgaagctcaactgcgcgccggacgtccacgccatcaaggaagcgctggcgctggccctgccgtcggtacaggggcagatggagacgctggcagtggacatgggctactcctccggggtgctggctatcttctataaggtggcgattggctcgggtatcgcgccgctggtgatctttatgggcgtcggggcgatgaccgatttcggtccgctgctggccaacccgcgcaccctgctgctgggggcggcggcgcagttcgggatcttcgccaccgtgctcggggcgctgacgctgaactactttggctttatctccttcaccctgccgcaggcggcggccatcggcatcatcggcggcgccgacggcccgacagccatctatctgtcgagcaagctggcgccggagctgctggggccatcgcggtggccgcctactcctacatggcgctggtgccgctgatccagccgccgatcatgaaggcgctgaccagcgacaaagagcggaagatccgcatggtgcagctgcgtacggtgagcaaacgcgagaagatcctcttcccggcggtgctgttgctgctggtggcgctgctgctgccggacgccgcgccgctgctggggatgttctgcttcggcaacctgatgcgggaaagcggagtggtggatcgtctgagcgatacggtgcagaacgcgctaatcaatatcgtcaccattttcctcgggctgtcggtgggggccaagctggtggcggacaagttcctgcagccgcagacgctggggatcctgctgctggggtgatcgccttctgcgtgggcaccgccgccggggtgatcatggcgaagctgatgaacgtgttcagtaaacacaagatcaacccgctgataggttccgccggggtgtcggcggtgccgatggcagcaagggtgtccaacaaggtgggtctggaagcggacgggcagaacttcctgctgatgcacgcgatgggcccgaacgtggccggggtgatcggctcggcgatcgccgccggggtgatgctcaagtacgtgctggcgatgtaaaccggtacccttcccggatggcggctcgcgccttatccgggctaccaaaccagcgcccgactcaatggcttttgagcgggcgtttttccgaaattttatgatctgtgcgccaactgcaggtacgcagacggccaaacgaggaaactaactatttaatgtctatcggccctatgtacacccgaaaaatcacccattggtttgcaaggcgatccttccagaatcgtatcttcctgctgatcttatttacttcgactgtcgtcatgctgggcatgtcgtggtatctgacagacattaccgaggaacgccttcattaccaggtcgggcaacgggcattaattcaggcaatgcagatttcggcaatgccggagctagtagaagcggtccagaaacgcgatctcgccagaatcaaagaacttatcgaccccatgcgttccttctctgacgccacctacattaccgtcggcgacgccaacgggcagcgtctttatcacgtcaaccctgatgaaatcggcaaattgatggagggtggcgatagcgatgaggcgctatataacgccaaaagctacgtctctgtccgcaaaggttcgctgggatcgtcgttacggggtaaatcgccggtgcaggacgccaccggcaaagtcatcggtatcgtgtcggtcggttataccatcgaacaattggaaaattggctcagcctgcagataagctcgctactgatcccgatggcgattatcctgctactgctgctgttctgcgcccgccgcttctcgttgcatatcaaaaaacagatgctcaatatggagccccagcagctatcgcaactgctcattcagcaaagcgtactgtttgaatcggtgtttgaagggctcatcgccatcgactcaaattataagataaccgccattaatcagaccgcccgccgtctgcttaatctgagccagccggagcccgtactgatcggtaaaaagatcagtagcgtcattacgcaagaggccttcttctacgatgccccgcatgaaaacaaaaaagacgccatcgtcacctttaatcagatcaaagtgatcgccagccgaatggcggtgatcttaaataatgcgcctcaggggtgggtgattagttttcgcagcaaagatgacatcaataccctcagtctgcagctcagccaggtacagcagtacgccgataacctgcgcgccgtgcagcatgaacatcgtaatctgatctcgaccatagccggactgctgtttctcaaacgctacgatcacgcgctggatctgattcagcaacagtcagaaagccaccagaaggtgctcgattttattgcgcgtaatttccaggataaccaccttgccggactgctgatcggtaaatattaccgggccaaagagctcggccttgaactggtgttcgacccatcctgcttcgtcgacatacttcccggcgcgctttcgcacagcgaatggatctcgatcgtggggaatcttctcgacaacgcctacaatgccactttgcgccagccgctgggatcgaaacaaatcgaatgtttgattaacagcgatggtcatgaactgattgtcgagatcgccgatcagggttgcggtattgacgaggcgctacgcgatcgcatcttcgaacgcggcgtcaccagcagcgccagcggcgatcacggtattgggctctggctggtacgcagttacgtagatcaagcaggcggcagtatcgtcgtcgaaaataatattccttttggcaccatctttactctttatatccccctgacccgagatgaacatcatggatagcattactactcttatcgttgaagacgaacctatgctggcggaaatcctggtggataccatcaaacagttcccccagttcaacgttatcggcattgcggataaactggaaagcgcaaaaaaactgatgcgtctctaccagccgcagctgatcctgttagataactttctccctgatggcaagggattggatctgattcgccacgccgtcaataccaactacaaagggcgaatcatttttattaccgctgataatcatatggataccatcagtgaagccctgcgtctgggggtatttgattacctgattaagcccgtacactatcaacgtttacaacacaccctggagcgcttcgcccgctaccgcagttcgctgcgttcgagcgaacaggccagccagacccacgtcgacgccctatttaatattcaggctcgcgagcaaacagaacctgccggcgcgccgctgcgcgggatcgatgaaagtacctttcatcgcgtgctgcagctgttctccgccccggaagtggtgcataccgctgactctctggctcgcatccttggcagcagtaaaaccaccgcccgccgctatctggaacaaggcgttaaaaacgattttctggaagcggaaatcagttatggcaaagtcggccgaccggagcgcatttatcgcggcaaacatccttatcctgagcacgcctgaaatgcttactcgagggtatagctgacgatcatctgcccttttttcattttcaactggctgataacgatacttcccagcgccgccaggctggcaacgtgggtaccgccacagggataagccggtagctcgccgaatcccacggcgcgcaagccattagcgaaggtgatgcggcgcggtaaatcctgtcgttgccacgcgctcacctgtgccagcagtgcgctggcttccggtaatacggcgccagcgccggcagcaaacgtaatccgcccctctccaggccagtgatgcgccttcaccggccgccagcctaactgctcgccagccagtcccagcaaatgaccggctgagtgcagacgggcatgtagctgccgcgcagaggcatcaattcgtatcttcacctcacccagcggcagcggctgctcaacgatatgcagtacgctatcgccgcgtgtagcgaccgtcattacgacctgctcgtcgatccagccgctatccgacggctggccgcctccctgcggatggaacagtgtacgatcaagttcaatggcgtaacggccatcggcttcagcgcgacagccgataatctgagcacgcccttcggtggcgtcgctggcgtaataaacacgttcagtcatggttgttctcctctctgtcagcacagtatattgataatattgacagcgataatctcctctacaaccaatgcacttttgctccgagggcacaaatgaatttgaatcttctacctgacctcgccctctttgtacaaattgtcgagcaaggcagcttttccgccgtcgcccgccagaatggcattaccccctccgccgtgagccgcagcgtctcgcggctggagcaggaaatgagctgcaagctgctgcaccgaaccacccgcaaactacgactgagcgatgccgggaaagcggtatatgaatctgcgcttgaaatgctggaagcagcgcgacaggccatggactccgccgggagtacccaaacggtggcacagggcaaactgaccctgagcgtgccgaaggccgtcggacgctttgtcatccatccgctgatgatggagtttttcaaccgttatccgcaggtagacgtctgtttacgattagaagatcgcgatctcgactttattgatgatggcattgatctcgcgctgcgcattacccataccccttctccaggcctgcatggcaaaccgctgatgccgatcgctcatctcatctgcgccactgaggaatacttacagcgccacggaatgccgcataccccacaagatctgcgtacgcatagctgcatcagccttggcgaaacgcccgccgacgcgcggtggaaatttcgtcgtgaaggcaaaagcgaaacggtgcagacgcatggacgctacgccgctaaccacaccgccgtgcgtctcgatgcggttaaacagcatctggggattggcagcctgccgctgtttaccgcccgcgaagcgctggcaaaaggtgaaattgtgcaagtgctggcggagtgggagtttatcagcagctactctggcaacctgtggctactgtgggcgggacataagcatatgcccgccagaatgcgggtgatgattgattatcttagcgagaaggtgccggcgttgaacgcaggcaacacattgtcggccgccaactaaaacgtgttcatattttccagaagctcatctgctgacagcaaaatagctgccagcaggcattagaatcaattaatggccgtttattaattgatttttattataattaataaggccaccggctttgataatctcttgttccgatgaggttaatttctccatataaagtgttaactgccgcaccggtcgattaccgttaaccacaaaagcggtgatatcacttaaatcgcccttcagcgcgctttttattgccgggatatagataaaatcaccgacctcaaaatcaggcgcctctttcatctgcagcggcagcatcccccagttaatcacattggaacgatagcgcttggtcgcatactcctggcaaatatttgccagcccgcccaggactcgctggcagctggccgcctgctctcgcgccgatccatcaccgggcttcaccgcatagatcatgctaccaatctccgtctgtgccgcagttattttatcctgacctggcagcagccgtatctgggaaaatatattttccagcggtggatttaaacggcaaacatcctcaccattgacgcgttgttgctcaatggcggcaatttttttagccctctctacatactgcggatcgcggcgggaaagggtaaattctgccagtcctaatgggtttgaacgaaacgatgatgtttcacctgacggtatcagttcgtcggtagtggtcaccggatccattatttttgaagtaacggctaatagaatattatccgttaaggcattcatttccggccagtcttttatatttgggccatagatcagcggttgctgcgtaacacctttaacgaatccctgataaacccgatttttatagggagaaacatcaaattcatattcctgagcttcgtgccaacaatcgagctccgccgccgaggttaacaatccccgttagcggccgtcgcggcaattgaacgcgcatccatcagtgccaccgctgacatttgcccatttccgggtttggaaccttcacggttcggaaagttacgcgtcgtatgacggatgctcaagccgttatgcatcggggtatcgccggcaccaaagcaagggccgcagaatgcggtacgaataatggcgcccgcgctcattaaatcattgatcattccccgtttcgttaacgccatcagcaccggctgagaagaaggataaacagatagtgagaaaatattgtcgccacaggaatgatgcctcagggcattagccgcctgcgccacgttgacatagttccccccgcgcagccagcgataattccctgctgaacgcgtaatttaccattctctattttgtccagcagagatagcttcgcgcgccccagcgagattttctcagattcaatttcaacttcgcgtaaaatgtccggcaaattctgattaagcgtatcgatttcatagacattggcagggtgaaacggtagcgcgatcatcggcttgatagtgcttaaatcgatctcaatgcagccatcgtagtaagccatctcttgtgctgacagcgcacgataatctttctctcgaccatgaagccgtaaaaagtgccgcgtttcttcatcggtctgccagatagaggataagcaggtggtctcagtagtcatgacgtcaatactgtttcgatagtcggtcgacatagtggccacaccgggaccgacgaactccatcactttgttcttcacataaccgtttttgaataccgcgccaattaatgccagcgcaatatcctgagggccaacgccagcggcaggtttaccggttaaatacaccgcgacaacgtcgggataatcaatatcccaggtgctccccagtagttgtttaaccagctcaccgcccccttcaccgacggccatcgtccccagcgcgccataacgcgtatggctatcagagcccagtatcatttggccaccgccggccatcatctcacgcatgtattggtgaataacggaaatatgcggcggtacataaattccgccatatttctgtgctgatgtaagaccaaaaatatgatcgtcgctgttaatggttccgcccactgcacaaagtgaattgtggcaattggttaaaacatacggcaagggaaagcgcgtcattccagaggcctttgctgtctggatgatgcccacgaaggtgatatcatgggaggccatggaatcgaatttaacttttaatttccgttcatcgtcagaaatattatgcgatgacaatattgaccaggcgatggttcccttccgcgcaatatctttagcgacaggatttgcacattcctcttctggaataatcccgtactgatgggataaatataccccacgatcgtgtaatttgatcatgactagcatcctttaatatagactaaataataacggtgtttttattcgtaactctacgaataaaaaggaaagaatatcggcagcaaaataaaactaacaattaccgagatgacaatcagaggtaatccgactctgacataatccataaagcgatatccccggcggaaaaaatcatcatattcgctggcgtcccgaccggcgtcgcataggcacatgaacagccaatgacaatagccatcagcaccgctcgcggatcagcgtccattgagtttgcaatagacaagccaatcggaataagtaaagccgccgttgctgtattcgacataaaattggttaatacgcaggaaattatcaaaacggcacttaataataagaacggtgaagcctgttgaccaagcagatcgataattgaacgggccatgattgcaccagcgccagtagtttcgagtgctttcgctaaagctaatgtgccaccaaaaaggaaaatcgtctgcgagtcaattgattggtaggcctgtttttcagtaatcactcgcgtaataaccaaaaataaggcgccaattgaaccgataatcgcaattggcaaaccaatgacgttctcaaaaatcatgcccagtacggtaaataccagcactaaaacagcgatcacctgcttgtgttttggacagtcaacctttctactcttttcagcttttaccgttacactcacagattgtgcaggtaacagtttataaccgatggtcaaaaagtagatcatcccgcaaagcagcatggggatgcccagttttgcatactcgaaaaaaccgaagcgttgaccaacttgttcaagcgccgactgggcgatcagattacccggcgagccaataagcgataagtttccgcccaacgccgaagcaaacgctaatggcattagcaaacgagattgcgcataaccagacttgatggcggcgccgatgaccacaggaatcaataccgcagccgttcccgtattagacagaaagccagagagtattccgcagaccaacataataataacgataagttgcttctctgagcgggcgtaacgggtaactattccgccaattttatccgtcactcccgtctcaaataatgcgccaccaaccacgaacattgccacaaataaaataacgttctgattaataaaccccgcgaaagccgtttttacatcaaaaacacctgttacgactaaagtaatacagacgatcatagccgtagcggctaaaggaattttttcccaaacaaacatcacaattgaaaataacaacagtgacaatgtaattgctactggtgacataaatatataacacctctttcagtgtgtgaatttaatagttagtctaagcaggtgatgcaccattttaaaaaatcaaattatagttaaatgactttccagtacattaataattcccaccaccaaacccctacggtgatatgcaagataaaagtcaatagcgctaatataccgccaacaatccaccacgatttaatatcattataaccaaccccgaatatgaccgggccagcagcaccaccataatgagtgaccataccgccataggaattactaaacagcagagctaacgcggttaacataactggcgcgccggaaacgttcgccagcatagcaaacaccggaaccatcgccacaatataggcgctgcccgaggcaaagaaataacgaaccagtatactcagcgcgacgatgacaacgaaagccagcgtgctatgactgccaaatgaaatgttatctttcagcagttcggccaaccacaagaaaaaaccaactttggaaagcaaagaactcaaaccaatgataccgccgtaccaaattagcgtgttccagccacctttatttttaatgacatcatcccaggtaacaattttcaaaatcagcattagcgccataacgcaaatggctaccgttgattcattgaccccaagcgaagtgctaaatacccagccggctaatgccatcacaaacaagcaggagagcattttttcacgcagggtcattggtcctaaagactcaaggccttctttagcaattgctttattatctactttttttaattctggcggatatagcttataggttataagcggtgttagtaacagcatgattaaacctggcaatatgccggccaacgcccatccgccccagctcaatttgatatggcaaatatcctcaatcattttgagcgccagaatattacccgccatggcggtaaagaacatataactggtcgttttggtaaccatatagacgttcatcattaaataatgaccaacgcgttttgccgtatgctccggttccgatcctagcgcgacagccacgctattgatgattggtaagacgattccgccggcacgagccgtattcgacggtgtcgcgggtgaaagaatcagatcaagaaaggcggtaacatagcctaagccgagtgtggtattgccaatcttgccaataagaatatatgcaatccgtttacctaaaccagtaataacaaaagcggcacttaaggtaaacgcagagaaaaccagccaggtagtccccgacgcatagccacttaatacactcgatgattttattgaaccatcgcctaaattgccaatgacaaccatggaagcagccacggcgactaacagtattactggttcagaaaatggtttaatcactaaaccaacaattgctgccagatatatacctgacaatacccatgcaagttcagtcaacccagccggggccggaaatagactaatcagcaatggaatggcaacaagcactaatagcttgcataatgtttttttatccattttaatcccttacctgaatgaattttataagtgcgcagccgcaattattcagggagataaaccatgccagaaagaattttacgtgcggtacgaatcaccgatgcgcgaatattttcaggagtttcattagcattacttaaactgacgtcaatacttccgctagggtgttcaactctgattaatccctcacccgacattctcgtcagctcgttaactacggtatcagcaataatacaagaactcgccagaccgatagcgcccgtaatagccaacgatttatgacagttatggggcatgaaataccgcacactcagcgttccaccatgttgaggtggagcaaccagcactggtttaggtattaccatgttcgagacatcgccaaaccccattgccgcgcctgcttgcttacgtattgattcaagccgctgaaaaaattccttatcctgatctaattccgccgccgattcataccctgttttacccaagctatgcgctggaataataaccatcggcatcgccatatcgatacaggtgacgcgaatatcatcaaaaatatcaacccggttgccggttgggaaaagctggcctgatttcgccccggcggcgtttaagaatgtcagacccacaggggccgcatgcccaggaacgccgtcaatatgggtatccccttcataaacgacctgaccgttcggcgtttgaatatctgcgtcaacaaaggtgttggtattgacgtttctgatacgcacccgcgttaccggggaattcgccgcgacaagtcctttttcgatagcaaacccgcccaccgcgcacagcatattgccgcaattcggcgtggtatctacccggcgttcattgacaatgacctgcacaaataagtagtcaatatccgcttgttcgctggtcgattgactgacaattgccactttgctggtttgcggactcccgccgccaataccatcaatttccagttcatggccagaacccatgatagttaataatgtttcatcacgtttttgaatatcttctggtagatcatctgctaacagaaaagcgccttttgatgttccaccacgcatgagaacacacggaatttgtttcataacatgttccttacaaatataaaaagattaaataaacggggcgtgaatttaatgcacttaatgtatttaaagttttttatttactttattattcatttactcgcacaaccgtttaccatctgattctacttgcaaggaagatagtgattgataaaatataaaaataagacttatacctacaaaacattaataacaactatcgccatggcaataattaacagagccattctatatataaattatttatttctgattacggagcagcaatgaacaatgaactatccggaatgaaagcttttgtcactgttgccgagctgggttcatttagcaaagcggcagaagtacttaacctgacgcaacccgcattgacccgcaaaatacaaaaaatagaaagtaacctcaatacagcccttttcgaaagaaccacccgaaaaatcatgctcactcaagcaggaaaaatgcttcttccaaaggcaaagtcactgattgccagccttgatgccgccatttttaacatcagcaacctgacttctaatgtgcatgatacggtaacgctttcttgtatcccgacggcggtattttattttttacctcgcgccatcgttcaatttaatcagcgttatccccatatcaaagttcgaatttatgaacaaggtatagaaaattgcatggcctcggtgagaaaaggcgaagtcgattttggaataaatatgaacttcatcacatatcccgatatcgaatttagcccactcgttaatgaacccttcgtgctggcttgccggcaggatcatccgctggccagtaaaaaattagtggaatggcgggagctcgtctcgcagagattagttggcgtcagacgctcgagcggtaatcggcaactgattgaaagttgcctgcaggataagccatggaaattagattggttttacgaagtcagacatttatccacctctctgggtctggtcgaggcggggcttggcatatcggccttgccctgcctggccatgccgcatcacgccaacagcgctgtcgtcagcgtgccgctggttgaaccggtcatcaggcgcacgctgggtatgattcgcgttaaaaaccgtccactttccgccgcggctgaacgcttcgcttcattattgctactcatgtggacggatgaagcgagcgagttatggtgtaatgtagtcgattcacaccagcagctataactgtcacggcgcgagagcgaaaacctccgccgcccaacgttgaaagcccgcgacatccaaatccagcgccacctgtgcgttggccggttgtcccagacgcccttcgatatccaccacggtggtgccagccgtccaggtcccctgcgtctctaccgccacaaagcagggtttaagcgtaaacagatccggacgaaccaaccacgcgatagcgcatagatcatgcattctcagaccgctgctcatactgccactgcgataatgactaaatagcgcatgaagcattttgcccgtttgattgagcgtgggcagagtgaccagatagtccgcactcagcatcgctttattggtgacatccagtccgcacatcacaatctccagcccgctctggaagactttagcggcggcttcaggatcgatggcgatattaaactcggcgttggggtaaagttgccgcgcccggccgagccgcccatcagcaccagccgacgaatattaaacaggcactcagggtactgcgtaatcagcagggcaatgttggttagcgggccgatggccaccagggtcatgggttccggcgcgtgcatcaacgcatcgcggatcgcctgaaatgccggttttgccagcggttgacggttatgttcgacgaaatcatagccctccataccggattcaccatgcaccgaggcggcatcgcgcaacggacgtaccagcggcatcgacgcgccttgcgccagcggtacatcggcattccagaaatgcagcagttgcagcgcgttgcgggtcgtcttttccaccgagacgttgcccgccaccgtggtcattaattgcaaatccaactgtggcgagaagagcgcggcggcgatcgccgccgcatcgtcaatacccggatcggtgtcgagaataatcggtaagcgcatggttttctcccaaaaaaaatgccagacgttaagtctggcatcttctcatactgttgggtgaaagaacttattctacttcacggacatctacacgcagctctttcggcacctcgaaaacgatattctcttcacggccttccaacggcaccgcttcgccgccgcccagctcctgtagacgggcaatcacgttctgcaccaggatatccggggccgacgcgcccgccgttaccccaacgcaggcagcagacttaacccattgttcctggatatcggtggcatcgtcgatgagataggccgctttccccattcgctgcgccagttcagccaggcggttggagttcgaggaatttttcgaaccgaccaccagcaccacgtcagcctgctccgccagcgcgcgtacggcttcctgacggttagtggtggcgtagcaaatatcatctttacgcgggccgacgattttcgggaagcgctcgcgcagcgcgtcgataacgtcagaagtatcatcgacggagagcgtggtctgggtcataaacgacagtcgggcatcgtttttcactttcagcgtcagcacatcctccggcgactcaaccagatacatgccccttcggggttattgtactggcccatggtgccttcaacttccggatgcccggcgtggccaatcagaatcgactcttcgccgcggcggctggcgcgggcgacttccatatggactttagttaccagcgggcaggtagcgtcgaaaaccgtcaggtcacgactcttcgcttcgttgcgtactgcctgcgaaacgccatgggcggagaaaatcaggatcgcgccgtccggcacttcgctaatctgttcgataaaaatcgccccacgctggcgcaggctatcgacgacgtagcgattgtggacaacttcgtgacgaacgtagattggcgcgccgtacagcgtcagcgcgttttctacaatgctgatagcgcggtcaacgccggcgcaaaaaccgcgcgggttagccaacaggatctgcattttaaccctccagcgccggatcgacttccagcacttcaatatcaaaatgaacggtacgcccggccagcggatggttgaagtcgacggtgatggaatcgccgttcacttcgcggatcacaccgggcatttcgctgccatccattgcggtaaagagcataatcgcgccgatctccggctcgccagcgtcgataaactcgcggcgagagaaatactggatcaggtccggggtcggtacaccaaatgcggcgtcaggttccagcgaaaacgtggttttatcgccggctttcagccccagcagatgctgctccagcccttcggaaagcgaggcatcgccaagacgaaacagcgctggtttgccgttgccgcgcgtggattcggcggtggagccgtcatccagtttcagcgtgaagtgcaccagcaccgcgctgttgctctgtacagagttagacatgcaggtttgctcttattgccgccacttgtttgcccggtggcgctgcgcttaccgggccaacaaaggccgatgtatactgtaggccggataagacgctttagcgtcgccatccggcaattttttatgatgtttttttatcactggaaggcaagaagccttccagtacaatcagcgccgcgccgatgcagatggcgctatcggcaaggttgaaggtggcgaaatgccagtcgccgacatagaagtcgatcatatcgacgacaaagccgtgccacagacggtcgaacaggttacccagcgcgccaccaatgatcagcgcgtaggcaatgttgttcagcttttgcgtcgccttcgaacggtacatcagcaccgccagcaccacgcagataccaacggcaatcccggcgaagaaccagcgctgccagccgccgctgtcggcgaggaagctaaaagccgcgccgtagttgcgcgcataatgcagattaagcgatggaaacagcgaaaccgtctccccagagcgaagttctggaggatcaggaatttgctgcccagatcgataatcagcacggctacgacgacccacagccagcgtagccccgttgaacagatcgatttactcatcaggcgaatttacgttgctcgccgtcaccggcgacgttactgacacagcgaccgcagatttctgcgtgttccgccaccttgccgacatcgctggtgtaatgccagcagcgtgggcacttctcgccctcggctttgctcaggaccactttcagccctttcagcagatcgctctgccaggcatcagccggcgcctgtgcataatcggcaacgttagcgccggaggtcaacaggacaaatcgtaattcttcgcccagcgcgttgagcttggccgccaggtcagcatcggcatacagcgtaaccgccgcttccagagaaccaccgactttcttgtccgcacgcgcctgttcgatcaccttgttgacttcgccgcgcactttcagcagttcatcccagaaatcgtcgttcatcgcttcgtcgtcggccaggccgaacaggccttcataccactcgccggtgaagacgtatttttcacgctcgcccggcagatagccccagatttcgtccgcggtgaaggacatgatcggcgccatccagcgcaccagcgcttccacgatatggaacagcgcggtctggcagctgcgacgcgccacgctgtccgctttcgcggtgtactggcggtctttgatgatgtcgagatagaacgagcccatttcgatggagcagaagcgcatcaggcgctgcaccacttcgtggaagtcgtaggattcgtaggctttgaggatatcttcctgagccgcctgcgcgcagccgaccgcccagcggtccagaacgaccatctcttccggtttaaccatatcttttgccggatcgaaaccgttaaggttcgccagcaggaagcgcgcggtattacggatacgacgatagctgtccgcggcgcgtttgaggatttcatcagagaccgccatttcgccggtatagtcggtggaagccacccacaggcgcagaatatcggcgcccagtttgttcatcacgtcctgcgggctaacggtgttaccgatagacttggacattttgcggccctgaccgtcgacggtgaaaccgtgggtcaatacctgacgatatggcgctttgcctttcatcgccgtggagatcatcagcgaagacatgaaccagccgcgatgctgatcggagccttccagatacatgtccgcggcgtgaccggcgaattccggacgcacatcaaccacagaagagtgggtagacccggagtcaaaccacacgtcgagggtatccggcactttttcgtagctgtcagcgtcatcgccaaggatgtcgcgggaatcgagatcccaccacgcctggatgccgtcaacttcaacgcgtttcgccacttcttccatcagttcgagggtacgcgggtgcagctcgtgggtttctttatgcacgaacagcgacatcggcacgccccaggtacgctgacgggagatacaccagtcaggacggttggcaaccatcgattcgatacgtgcctggccccagtccgggatccactgcacgcctttgatctctttcagagactgcgcgcgcaggcctttttgatccatgctcacgaaccactgcggggtagcgcggaagatgatcggcgatttgtggcgccagcagcacggatagctgtgctgcattttttccacgtgcagcagcgcgccgctgtcacgcagcatctcaacgataatgtcgttggctttgaagacgttgataccatccagagatgggtaagtacctggcagataagaaccgtccgggccaaccgggttggcgatttccagaccgtatttctggctgatagtgtaatcgtccgggccgtggccgccagcggtgtgcaccgcgccggtacccgcatccagcgtcacgtggtcgccaaggatcgccggcacatcgaaatcgaggaacggatgcttgaagcgcatcagttcaagctcggaaccctgcaccgccgccaggatggtgtaatccgcgacgccaatgcgctgcatcacgctctcaaccaggtctttcgccaggatcagcgcctggccgtcaacctgcaccagcgcatagtcgaactcaggagacagagagatagcgcggttggccggcagggtccacggcgtggtggtccagataaccagagaaaccgggccggtgacgtcggctacgccgaacttcgccagcacagcggctttatctaccgcgtggaacgctacatcgatagacggagacgttttgtcataatactcaacttccgcttccgccagcgcggaacggcagtcaacgcaccagtgcaccggcttagcgcctttatgcaggtgaccgttgccgatgattttacccagcgcgcggatgatattggcttcagttttgaagtccatggtcaggtacggacgcgaccagtcgcccagcacgcccaggcggataaagtctttacgctggccgtcaatctgctcggcggcatattcacggcacttggcgcggaattctgcggcggtgaatttctcacccggcttaccgtattgctgctcgactttcagttcgatcggcaaaccgtggcagtcccaacccggaacatacggcgagtcaaagcccgtcagtcctttggacttaacgataatgtctttcagaatcttgttaaccgagtgaccaatatgaatgctgccattcgcataaggagggccatcatgcagaatgaaggtttttttgccttttttcgccgcacggatgatgccgtacaggtcatcatcggtccaacgcgccagcattcccggctcgcgtttggcgagatcgccacgcatcgggaaccctgtttccggcaaattcagggtggatttatagtcactcatcagattctcggttccgttatttcggtttgataaataccagtaggattatccctgcctggtgagcccaaagtactcgcgggccgttaactcatctcgtgcgatttgcgcttttagctcatccagcgacgcaaaacgctgctcgttacgtatttttttacgcagtattacatctatatggcgaccgtagaggtccattacaacgtccagaaggtgaacttccagctgctgtcgcacgccggagaccgttggacgagtgccaatgttggcgacgccgggtaatggcttatcgccgagccctgccacttctaccgcaaagacccctttaaccggggaaacctgacggcgcagcggtaaattcgccgtcgggaaacctatggtgcgccccagctcatcgccgtggacgacgcgaccagagatggtaaacggatgccccagcaggttttccgcctgcgcgaggtcatcgtcggccagcgcctgacgcaccgcggtgctgctaatacgcacgccgccttcgcagaaggtctgggtactggtgacgtcaaaaccgtactccgccccggccttctgtaataacaagaaatccccctgacgaccagcgccaaagcggaaatcatcgcccacagcaaggaactgcacgcctaactggcgcaccagcagttcgctaataaaatcttgcgccgtcagcgccgcgaaacgccggtcgaaacggacacacagcacgtagtcgacaccgctttccgccagatagccaagcttctcacgcagccgcgtgatccgcgccggcgctttatcggcggcaaacagctccagcggctgcggctcaaaaatcatcaccacaaccggcagaccgagctggcggccctctgcgcgcaggcgctgcagcagcgcctgatgcccgcgatgcacgccgtcgaaatttccaatggtcagcacgcacccgtgcggggcctgactgagattatgtatgccgcgtatcagcttcatgtctggctcaaaacagtgaaaatcgtccgagtataccttgtacaacaggcgacgttaaccagcgattgcacctcgattacgaaagatcctgctaattcattcactcagcgtaagaatgcaggaaaaactatacgcagccgtcgatttttatggtggaaagactgtattcgactacaacaagctggtagaatcttgcgccatcactacgtaatgaagcctcgttatcttaacggcgcttatttgcacaaatccattgacaaaagaaggctaaacgggcatattcctcggcctttgaattgtccatatagaacacatttgggagttggaccttggctaatatcaaatcagctaagaagcgcgccgttcagtctgaaaaggctcgcaagcacaacgcaagccgtcgctctatgatgcgtactttcatcaagaaagtatacgcagctatcgaagctggcgacaaagctgctgcactgaaagcatttaacgaaatgcaaccaatcgtggaccgtcaggctgctaaaggtctgatccacaaaaacaaagctgcgcgtcataaagcaaacctgactgcacagatcaacaaactggcttaatcgcctgcttgctgaactttgttaaaaaaacccgcgaaagcgggtttttttatgtctgttgtttgccggtacttagttttgcggctgcgcaaacagcgaggaataatcgcgattacagatacgctgaaccgcgggatgctgaatcattcgctcggcaaaaatagcgtgatactcctccatcacgttctccatgcgtccaatttcgacaatcgactcatcggcgtagaaatcgtgagcatagagtgttggcgccacaaaaatcgcattatgcgccgcgccgaaggctttcataagcgccgcatcgtcgaactcgccgagaatttcaacctgcagcccctgggaattaaaccaattcagcaatttgcgaccaagcattgaacggcggccgggaatgagcaagcgacgctcctcaaggcaagcgggaaacggtttttccggcggcgggctcatacaccagaagcttaccccgcactcgccgattttcaccgaaaacagcccttcctgctgggtcgagtcaatcgggcaatctgagataatcatatccagcttatgctggctcagttgctccagcagcatctcgtgagtggattcaaagcagcgcagatgaatttgctcatcttccactaccgcagcatccagaacgccgctcaccagccgcttggaaagcgcatccgcgacgccgacatcaaacagcaggttcgactctttgcggtaattgacgatatcgagcatctcctggctcagggtgaacatgcgatccgcgtagcgaaacaccagctctcccagctcactgggttccaggcctcgtcctttacgtttaaagagtttcccctgcaatcgttcttccagcgccttaatctgcccggtaatcgtctgcggcgtcagatacagcgcctcggccgcgccgacgaccgagccttcccgatagacgtgccagaagtagtacaaatggttgtaattaatatgcgacatgcttctctccctgatatgtcccggagagcccgtaggctctcccgtgaagttacacgctgtgaggctccgttacgcgcttacgcagaatcatgtagccgatgatagccgacagaatagaccctaccagaatgcccagcttggcccagttgatcaatccggggtcaacgttactgaaggcgagcgtggcgatgaaaatcgacatggtgaagccaatcccgcacagtacgccgaccgccataatctgcgggaagcgggttcctggcggcagcgaggcccacttaaacttcagcgccaaccagcagaacaggctaatgccaagcggcttgccgacaaacagtccggcaatgatccccagcggtagcagtgaggtcagccctgccaacgtcacaccctgcagcgaaaccccggcattggcaaaagcgaacagcggcaggattagaaatgcgacccacggatgcagcacgtgttcaagctgcttcgccggcgatttgccattctgctccttcaacgggatcataaaaccaacgataacccccgccagggtcgcatgtacgccggatttcaataccgccgtccacagcaccgcgccaaccaggatatagataccggtgcgccgcacgccgcagagattgagcgccgccagtaccacaatggcgccagcggcgacggccaacgacagtaccgacagatcgttggtataaaacagcgcgataatcactatcgccccgaggtcatcaatgatagccagcgccatcaggaaaattttcagcgccgtaggtacccggttgcctaatagcgctagtacgccgagcgcaaaggcgatatcagtcgccgccggaattgcccacccttcccgcgcgacgggatcctgggcattgaaggctaaatagataagcgccggcaccaccatgccgccaatcgctgcgaccacaggaaacaccgcctgacggcggctggcgagcgcgccctggatcatctcacgcttcacctccagcccaattaacaggaagaaaaccgccatcagcgcatcgttgatccacaacagcatgtttttgttaatttccagcgcgccgacgcgcagctgtaccggagtttccaaaaaggcatgatacagaccgctggtgacgctgctattagccataatcatcgccagcacagcggcgcagattaaaataatgcccctgaggcatcgctactgaaaaatctttgcagatgtttcacttttactctcaccttattggtcaataactcgataaaagtatgatacagccaccaacacctcgaaaaaaacagatttaaattgccattaagttcgttttttccgatttctacaaatatctgttaatcatagaccacccgtaacagggtgagctgcctgtcggcgtcgagataacttttttccaccgttgcgtaagccgaagccagagaagtcgtgatattttccacaatcacgtgacgttcgatgcgatcggcgcgctggcaaaaaatctcgctactttccgtttcgttccagcagctttcagtaactacgttgccaaaaaattggatattaccggcagtgtgcgcccgcacactgccaatcgtgaacagtgaaatggccgccagccctaaccagcgtttcttgaaatgcatacgcgaaatcctcggtcggaggaagcagataaccgggtacagcgccccggtcgttgagacttagcctttagctttctgaatcgccatctgcaacgcatcctgcgacgtgctgcccggcactacagagatacgcccggcatccggagccgctgcctgcggcatcaccacaaaagccggggtaccggagaaattcatatgctgcgccagcgcctgattactcagcagcgcatcatgcaccgccccgctctgctgggcggttttaaccgccctaatctgcggctgggtgagatagtgcgacgccagcgcataaacatcctgcttggtgagctgtcctccaccttaccagtggcgtacagcgcattatgccaggccaaatacttttcgccgccatctttcagccacacctgttcgccgattctcgccgccaaaccagacaccggccagcgggatgaaaagatcggaaactctttaaagataaaacgcgtatcaggattcgatttcaccatcgcttccaccaccggcgacatcttgctgcaccaggaacactggtagtcaaaaaacatcaccaccgcagctttagcatccgccggtccaacggagggtgagctgtcgctcagcaactcagagcggtactgcagcgccagctgcgcataagcctgcttctgggcaacctgctggcgctgatgtagcgtttcgctggcggcaatcaggaattcaggatgatccgccagatacgtcgctaccgcttcgccgactttatcaggatggctggcaatatacgcctcagcggtcggcccaatatcgcctatcgccgggtcggtcttcgccgccagcgcggaaaaagagatgatgccgccaagcgctatccacgccgccgatttacaggaaagtttgcgcattattgagttctcattgttaagttcaggggatacccacaagggcagagtaaaatcgccatcatcgttgcgccgttaccgtgaccggcggcatcacgcctccggcatcgttgaggctttgccagcgcaccgcgcaacgtgtcgcctgtcgacaccacgacgtacggcgggtagaaaacggcgcgacgacacccgcggcgtctatcggcgtaccgttgacgcggattgaaaagagggtgacgtaatagggtcctgaattacgtaccgtcagcccatccgccgttaggttccagaccaactgacgataggcctgctgcgggtctcccgttagcccggcaggccggtaaatcagttttaacgctgagcgaaatgccatctgcacgctattggcgccggttttgcccgatggaatagcggcaatgctcagcgtaaacaagctttcacgatcccgtgccagcgcctcgccgctccatgcgacacgcagcgtgttctcctgacctgcgcgcaataaaaagagcggcggcgtcaccgcgaatggcggtttacgggacgacaaattatcggcgccgggccagcgtccgccgctcagcacgtggctatccaccagccagtcactgtccgaggtattgcgcagtggaacgctcaacgtcgtcctctcagcgtgataaataaaacgcgtgccgccaatcaccacaccggcatggcttattgcaacgggcagcagccagagccctggccagtagaaatgtcgtctattcataactcagcacgaaagtcgcggaagcatcggctgctcccggtgccactggggcgccatcagctacatagcgggcataaaactgtaaacgttcggacgcggcgcccgcggttagcgcctgcacatcgctctgtgcctccggcgcgatttgctgtttattcttgtcatacagcgcaattcccataccgcttgccatatccgccccggcattcaacgcgaacaaatcgccatcttgcggatcgctggtaccgctaaagctcaccgttacgccgctggcggtgctgccgcaattttgcagcgtgatcgaaaaaggctgccactccgcgccggcaccggcctgataaaactggcggttgctaacggttcccatatcaacctgaatattctcggaatccggcgacagcgtgcaggtgttgtcggtaatggttccggtgacgtagacccggccgtcatgggccagtgcgctacttgccgccagaaccagccccagcagaagtacagttttttgatcattgccgcgtgcctattcatattgcagatcgaaatacatcaccgccgtcgcattgccggaggtcacggttggccgggtagatttgtaacggatgtagaacgataaggtgttgcggcccgttttcagcggatagaccaccgaactggtattattgatgctgacagcatcctggtcctcatcaaggatctctacgccaacaccacctgccagcattttttcgctacccataccggtgtcgctcagcgccagcagcgccggattgtcgctgtcggcggtaccggtaaaccagattttgctgccggtaataccgcgcgagcagtttttcaggttgatgttgaacggcttgaacttcgtcgtcgtaccggtagagggaaaatctgccactgagaactgacctaaatcgatactctggctgaggctagaaatttcgacatcgcaggtttgcgcgacaatggtcccggtgaattccaggttgtaaccgctatcgtcggcatagcaaccgttgccccatagcaggatgaataagaagaagtaacgaatcaggcgcatttagtcgaaatccacccgtaagttagccagcgcggtgaaggcccctccgccggcgtctggccggtggtacagactggatacgcctgtagggaaatagtcgcgcgtccgtattcatccgtcgtgaaaggctcgacgctgctggcgtcattcggcgttaataccgcgccgtcgctgctctcaaccaccacgccaacatcaggattgtcagaggcaatggcctggcttaagtggctatcggcggtggctatcaaccgcagacttaagttgacctgtgaatccaccccactgcacttcaccggcacggtgaatcttttcttacgcacaccgctcggtttttccccggcgcgattgaagccgccgctgtacagcgagccaaaatccacaagaatggtttgcccggcgttaatctcacagctttgcggcactgtcacactgccgctgtagacaatgctgtacaccacattactcagtggatcgtcgccagtggtagtgacatagacattaaacatggtcttcggctcgatatttaccgtgccaataaatggcttcacaaccttaagctggaataccagattcgaatcatgtaccggaaaaggcgagccattgttaacgttggcgtcatagcccatatagacataatccattggtggataaaattccccggccgccgaatcttcaatgcgcattgctccttcaagataggtgccatccagctgcatatatttccagtcgccgtcggtttccactatcgatgaagaagcgacatacgaacgatacgtccgccccgaatccgaagagccggcgggacaaaccgcctgcacgttcacatcctggtttttactaagttgcgtggtcgtaccggcctgattctgcgccgccgttagcgtcgtcgtcaggtcataatcgaccgttgcaggcgagccattggtgttctggcaaacggccgccagactaccgcgggccagcagcagccccattaacagcacaagaaaagagacaggcttcatttagcgacattccagatgctgacgcgccaaaggctggctaacgtcagggagatgataatgagtgagacattgttggtcaggatgctgtccccattgtgctttcagcgtaccctgcgggctaaggcctgagagatacacttccccgtcgtcgccgacgatgccttcttcaggcgagccagcaatggaaactgtggcgccaaacggcagcggtttcccgtaacggcttaacgtcaacagcgctcgctcgccaacccgtgccgtaaagttggccagcaccagcgccccttgggtgggaacgacattgatcaccgcatcatcaatatcgacatcgtcttttagcgagttgacgtccagcgccatacggttctggcgataggtagtggcatacggcaccaccgcgtagccgcggctatcggtgtggatccccggctgatcttcaatattgacgtttcctgccccggcacggcaataaggacattggtatcgcccagcggctggctgagcgtcaagccatgggcatgcgcgactattccgccgctgaggccataattcagttgccgataatcgccatgattgctgttgttgtagccgacattcagattgcccttcgcgccatcgtattccaggctagcggaaccgctctcgccaacgccccgattctggtatccctgctggacgctgtagctcaggttgttttgatccaacaacgtaccgctgataccgctattctgcgttacgccgccgtggccatcgctactggtggagaacgtcgcataaacgttatgacgccgctgggtaatatcgtcgccgtgagaaagccactggctgagcggtaatgagatattgagcgccagcgcctggtcgcgttcctcctcgccgggcgtgcggctgctgctatatgacaggctccacgagatcccggccagcgtgtcgctgtagccaatttgtagcaatttattggtttcatcggtgtgccaataactctgttggctaccggtgacgtacagtgagccaaaatgaccgaactgttgagagaagttgatctgtaccttgccgcgtttggtgtaatacaggttgtagtcatcgccagtatcgcgatcgccgtcatcctcctgcgggtcgttatagcctgacatccgcttccacgcggtatcatcaagggtataaaaaccagaggttgagtagcgataccccaacaattgaaaatgggtgcccaggtcgtttaaggatttggcatataaaaagcgcagcgattgcccctgatgttcgctctcatccgccagcgtactgtaggcttgcgtaagatcgacggaaatcgccccccagtcgccgaagttagctccagtgcccagcgccagcgcgcggtaatcggaggaaaactgcgttccgccgtacagcgtaaagccatgcggcaacccccacatcagggtcgcctggccgaaactcacctctcgtttctggctgctatcaccacgataggtcgccgcggtggcggcatatttcacccgcccctcgcgttgcagaaccggtacggcggcataaggcacgttatagctggagatgctgccgtcggactccttgatctcgacgttgagatcgccgctggaggaggtcggatagagatcgtcgatggtgaatgcgccaggcggtacatagcgctggtcgatggtgtagccgttctgacgtatcgtcacctgagcgttgcttttggcgatgccgtggatagtcggcgcgaagcctttcatgctgtccggcagcatattgtcgtcagacgccagctgtagcccacgaaacggcaggctgtcgaaaacgcccgcgggggtgtagctatcgcccgccgtcaactcgcctttcagcgccgccacatcacgttcaacgtaggtgctgatgtgctgccagtcgcttttatgttgctgattatcgctgttgtagttccatgtcgagtaatcacgtaaacgccaggcgccaagatttaatccgctattgaggccgaggaaataactatcgctattggcgccgccaacgctgcggtcccggctattcgcgccggtaaacgtatagttgagcaacaacgcattgataccttcatcccagttttgtggcggaatatagccccgcgcctggttgtttagcgccgcctgcggaatactgatattgagacgctgctggctaaagtcaaaaacgctggaagccgcagggatcgcagcagcaatatcgacgcagtcgcccgcagcggccttcgccaactgcggaaatgcgcggatattcacgttcatgccgttgagcatctcaggtgtcaggcaggcgcgaaggcctgagccatcggcagactgctggttcgcgcgaaaagcaatatcgcgcgtcgtcaacaatgcgccattaagatagacatcgacccgataaaccccggtgcctggccattatcctcaaagtgggaaagatcggcgatcttcgacggatcgtcagataaaaaagccgggttaaaatagttttcggcccagctacgcggcagcgtgcataggcttgccgagatcagagccaggctgataagcgccggaagtctacccaccgtcaactggcgagcggcgacatcgagtttcaacacaatatcaatgactcagacaggtttgcagcggcgtggtggcgccgaaatcgttaatcgactggaaagtcacctgccctacgccgccttgcaacgttatctcgcttttcggcgggaccattgaattggctaacttctgcccgccgacatgaatatcaaccagcgagacataatagggagatggattgacgatggtcaggcgatcgtcggcacgctgacagcgtaacattgccggagcatctaccgaggcaaccggtaagtgtttggggcgaataaacagtttaatgacgctttgcgtggcgatttgcagcgaattcgccgccagcttgcttttattaaccgagggaatggctttactgttgagataaaaaacgctttcgcgatctgtcggcagggaggggccaacatacataatacgcagcaaattttcttttcccggctgaatgacgaacaacggcggggtaacaacaaaatcagcgcttcggtcgccatcggcattcgccacccacgattggattaaaaatacattattgctggaggagtttattatcggcagagagacctgcttatcaccctgcgggtaaataacccgggtcgaacccagcgcaataccgcctgcataggccaactgagttactcccagcgccgccagcagcaataacgaaaataaaatcggggtaattcgcgtactcatttttttgataaccacggaggagatgaaatgcatccctccgctgccaacaacggaggagatgcgataccaatcaggaatagaccatgctgaaggtcgcggtcgctgcgacattacctgcagtcgccgcgccggtagcgacataatcaacgctcagcggtacggtgttttcgccattaatcagagtgatcgcaccggaggtgtcgccgatgttcagaacctgtccatccgggccgtacaactgcagcgcaacatttgtcgccgaacccgcgccagcggtattcgccagcgagccggcaagtgaactgtcctgctgaccattaaaaatgaccgccgcattctggctaacggtggtgtcgcaatcttccagtttgatcgagaaatcttctttctgattagcgaccataccggcagccgtcagcttgctggtgcggacctggctcagggtaaccgtctgatcgatagagtcagctgaaacggagcatgcggcattcacaacctgtccggtaaaattcaccgtaccgccggagaccgttgaggtatccgcatttgccgcgcaggtcatcccccctgcagccatggctgtcattaccatcgctaaaagatgttttttcataaataaccttttaaatacacaagtcgaaaataagttaataacgaattttagtaccgagcgctcttcacagagctctcttgttggtaccgggcgcaaaaacgttaaaagttgtagcgtacagaaatactatattcaatgaatagcaatcccgcgctgatttataagcgccgagcgataattaatttctgccgttatttaattattataaattggccagagagttgcaatcggcagggactgtttttataggaccgccattaactaactgttttttacagtaaataaatcattgtaactgttatttagattcagccgttagtaagccaacggcagttttttaacccctaacagacgtccaccatcaatattgatataaccgccttttcgcaattccgaaagaagcttcatggtacgactcctcgatattccagtacgccgttgaataaaattgagaacattaatgctctggcgatattcgtcgttgtaggcggcaatttcgattaataacgcgcgaaccttaagataagaatcaacgccaaccagctcccggtcgcgaacgttcatcaccatcagacgataggcaaggaaacgggcaacgtcgtgccaaagattgcactcatccgtcactttaataaaatccgctagcgagaccgcacgaccacggcattctgtttcagcaatcaaaaaatgctccgggcgggtgggaacatcgtatgtcacgccatagctatctatcagccctgcaagcgaaggggcaaagaccgatagcacattcaaccctctgtcgctgcggcaaatagagaagatcccggactccagtaacacaattcgggtgctctgctctgtatacagcgaaaattcttcacccggctgcacgatgaaaggcttgccaaatggcaggagtgcagaaaataaggcatcaatcgcagcatgaggtttagcctgctgagagaaaatatatgagtgcaagacattctcattatcattttcgaaactagttaatttcattatatcttcattaaatatccataatcatatgagaaataaagatatacgcacattagttagccttcaattaataataaataaatactaaatatagaataaatgtatgatgaaagcacaaattatcaatcatttattgaataaggtaattctcaaacaaataaccaacaaagatctcaaaatatcaataactatttttaacatcgcacactattacaaatgaaattattttttatgatataacaagaaagtgaaaaggcggcgatccagaatagtacctcttctgaatcaccaccttaacgctacataaaatacaggaaattaactaaagtagcggggcgctgcgtaatactccgccattttctctgacaaccaaccgccatcttcaccgttggaatgaatagtggtgatactgacggtcgaaccgccgccccacagcacggcaaaaacgttatagtccggcagatttaacgcctgcatctggctccaatcatatccgccatcgcggcgcagaaaatcacccaccgtcgcgacgccataggtcgtgctgttcatcgcggtatttagcagcgttggggtaatggcgttgatatcgctgccaatccgcgaatcccccatgaagaaagtaccacctgacgcaaaatgcgccgccgcaattttactggtcccttccgccactgtcggcatatggccgccggggatctgccacaacatcgccggtttctgcaacgctctggcgacctccttcaccatgcccagatagttaaaccagcaggtagcgttccagccgtagtgggctaaggcatccgggctgaagcagtcgcgttcgaatttatcaaatacgataaaatctggcgcatagtcgccgctgtaaacccccagttcattaatgaagtcagcgatcgccgccccttgttcccgcggtgcggcattggcgcgcagcagccaatctgccgtgccagtcgcccaaacgttggtctgccagccaaaagcgatgtccggtgcgaactggcgaacgatatagttaatcgcctgcacgtagccgtacaaatcgttgctgaaggtcggcagcgtcggcgcgctgaaaccaggcatcgaagggagcgcattaatcgccgccgccagttggacattgacctgtacgctgttggccttacgcagcgcggtatagccataaggctcctgctgcatggcgcccaggaagtccggattcaggacgaaggttgccggaaccgggtgctggtcatctttccaggattgcgccgccagacactgagtaataaagctaccaaagtgattgcgtagacgctgttcgtcctgcaggtccgataccgcgctgccgccgctggcattggcggtataaaccaccatcaccggcatcaccgcgcggcccgcttcagcttctatctcgcgaaccagaggaacggttttatggatcggtagcgaggtataatcaaggaaaccatcaccgttactgtctacttccgccgccggaatcgggtcgccgccgccgtcaaaaccatcatatttaaacagcgcgctgaacggcacgccacgataaagatcgacagtctccgctgcattcaccgtcacgccgccgtgcgccagataattcggccatccttttacctgcagcggaacgccctggataaactcaagcgtgacattattaacgctttgcagcaaacgcaatggcgcgctgacgtcacagcgccatggcgtaccagcgatatatacgtccgctacctccacgctatattccccggcagcgaaacgcagcggcattttctgctgtcgagtatcgctttgcagcacgaaactatactgatgactgccgcagtagaaacgatagcgttgcgcggccgtcccctgcggtaagcctaataccgttaccgcgacctcaacaaaggtgtcgctcgcaacgggcgttttttgtaatgctacgttcacctgcatcgtctcaccgaccctcggcacgaatgccgcaggctgagctggggtcgtcagtaactgattgttcatcgtggtcggttgcagacagatggcatattgatgattcgctaatagccgagtgacgcactgcgattgattcgccatcagcgtcagggtacgttcgcacacgccagcttccgaccacagttcaacaatgacttctgcgccttccagttcctcatccgccagcagcaactcgatcgcggcaaagatcaccgctggctgataagcaatctggcaccgttcaacggcgttaccggacgagagtttcaacgtataactttcagcaacgggtgaaattctcatctcgtcgttacacaattccagtaccgtaataccgtagcttcctgcgctcagatcgccaatggtcagcgaagcgccccattcgccggcaaagcgctgctggcgaccatccggatactgtagctcaatctccggcttcagcgaggtgctctgcgcctgcgtcgggaattgcacaatgatttgtccctggcgtccaggatcatgggccagcgtcgccgtaaggtcgctaagcacgacgggtgtttgcgtggccgaaagataaaactccagcaccgccgatttaccagcagccaacagatactcgccgtcgttattgattgtgatggtatttttttctgtcggccaaccgccgtcgctggtcagcgtcactgcctgattacccagcatagtgccgctaaatgggctgtacggatcgggatgcgcggtcgcggtgaagcctaatttcaactggttaatatcgacggactgcgaatactggttcgtcagcgtcaaggcaatgcgctgataccaactggacgctttcacctcaccggataccagggtcagtgctgcgccggtcatcgtatcatcgacaggcgattcaggttcaacttcatcagcggtatcgtccgcaggtacttcaggttctggctcaacttcatcagcggtatcgtccgtcagagttaacgtaaaggtggacatttttaccggtacctgggtggcagccaggctaaaaaacagggtaccgctttcccctgcctgcagtagcaattcactactgttgttgatgatgatttcattgaactccagggttccctgggcggtgtcacgcaaagttaatgaacgatccccttttagcgtgcctcccgtattgccccacggatccggatgaccggaggcggtaaagctaattgccgcctggttcaggtcaaccgcgcagtgactttcgtttgtgaaggttaaagtgactttttggtaccagctgttcacatcaatctggctatttttaattacaacggtcatcaacgtgattcctcattccctggtggaaaaaagccccggaaaaccggggctttgtcatggagcccatacctcgttaagcgcagaagtatcagtaagcgcctaagtcagtccatgcgccgctctgaccgcagttcaggtcaggctggtcgccctgggaccaccatttcacctggtagttgtgacctttccagctaacaatttcgaaggtaccccagcttgcgccatatacggtgttagcatcccacagcgcgtgaggcgcatcctggtctgccgcatcatcggtagaggcgtcatcttcagccggtgtagtatcttcgtctggaaccggaataatgtcagtttcatcttcttcatcagccggttcaggttcgccctgagcagctaatgctggaaccgcagtcagcacaaaacgttgctgagtggaaggttcgttgtagcagtcacgcacaaacagagtgaactggagggtcgttttcgcgctcacttcaggcaccacgaactcaatcacttccgcggctttatccgcgacggtaatttcagatggcacgccccagctgtagctcagttcatcatcatcttcatcagaagaacccgcgccagacagttgaacggtagaaccgccgacgaccagcagctcaatagcggcttttggcgcatgattgacgtcagttgtcttatcgtcttcttcggattcatctttttctacgttgatgccttcgaaatagaacgggtccatatcgatgacttcagactcaatttcataaccgaggccttcacgagctgcgttcagcaacacgccattatcctgatcgatagtccaggtgaacataccgcccaggcccagacttgctgcatattcgccctttgcttttactgaacgcggggtatccagggacatgaacagcttggattccgggttatacaggtagtcagcatcagcgacctgatcggtgtaaacgttgaaaccattgcggcctttctggttttccagatccaggtagttgtagatcacgtcataccattcattcgtaccggactcgaaagtacccgtggtgtccccgttacctgggttataggtgcctttcagcggagacagcgactccagctcaacgttacggccattacgggtatagccggcatagccaatgttgatattttcagctgggaaaccttcggacagcagatgttccacgatagtgttgacaccccaaccgccctcttccagcgcattcaggttagtgtgatgggcaacggtttccgcccacggggtgccaaagaagtcataggtcatcaggttaatgccgtacagacctgctttaatcagcgctttcacgttggaataatcaaaggtcttcacgactgcggaactggcgatggagattttcacattgctcaggttggcggaatccagttgcttacgcagttcgccaatcagcaaggcgtagttttcgccatcttccggaccgcaagggttgcccgcgccttcggcattcgggtattcccagtcgatatccacttcgctgaacatcgggaactgtttgaacagcttcaccacacctttagcgaaggttttgcgtgcggaatcagacgctgcagtttcatggaagccgttgctcatggtccagccgccgatgctcatggacagcaccaggttgtggccttgctgtttggctttcgcctgcaggtcacgcagaccgccgagcagacctttggtgttctcctgggttacggttttcggatcaacgtcccagccgctaacactgtggccaacgttaacgtaagactggaagtcgccccacggatcaaggaaggtcggttcatatttgactttgccgcattgttccgcgccttcggcaaccacatcgcgatactgaccatcatttttatggaagccggtcacacctacgaatccgacaataattttgtcataagcggtcggtgagatattggtcaggtcgtagccgcgaccgcggttatctttagaatcgtccccttgcaggcgaccatcatactgagaccagtcggtataatagccaaataccttcggcttagtggttgctgctttatatttgttatagaccggctttgcgacacgcgctgaagtatagctatagttgctaacttcagttgctgggttaaaaccatcagcggcgttgctggtttcggtaagagtatcgcctttaatcagtttgctggtagccattttaaatttccttttaagtttaaaatttatcgcagttcgttctgcgagaacaataatccatgactcacgaagaatcggctaatcacaaaacctcagcaattcatcagcgttaaagaattatttttatgatgtcttatcaggaaacatcagcgtgacatcattgggcaaatgaggtccgtctcccggccggagtgacaaaaaacagacagcatattaaatattatttaggtagtaattaatcgtcatttaatttacgtgagattatgtgacaagaatctcctcaacaaataacactacaataaaacagatgacaaaaaatggattaagccatttcttgtgcaatatattcatcggcgacaatcaggatgtgcaaatctaaaggaagacgttatgaacacatatctcatcaataacaactgtatctacaacgaacagaaatatgaactaagaacaagctcaaattcgcaggttattcgaatgacggcaatgcgttccaaatgtcttagcttcattattgaaaacgctcatctggagattatcgaacgacagaaaatcaccaatgagctgtggggtagcagaagtcattttgtgaatgatgccaatctaacgcagatactgtatttaatcagacgtgacctgaaaacgctgggcataaacgatcttttcattaccatcccgcgccagggattacaggtcaacaaggacatcaccattgagaaagtcgaacccaaaaaacctaaagtcaggaagcagtttttccgtaaaacgctagcggccctgaccaccgtcttttcggtcacgctaggtacaatgatgtacatgcatattcattaattcagggagaataaaatgaatccaattattgatggaatcctcggactggaaggcggctatagcgccaacccgaaggataaaggcggtgagaccaactggggcatcactgaagcaacggcgcgagcgcacggttatcaaggaaagatgagcgaactttctcacaatgaagcctatgcgatgctggaagcggattactggatcaaacccggctttgaacaagtatcgcaactttcctgggcggtggcatttgaactctgcgatgccgccgtgaatattggtcctcatcacccttgtacgtggctacagcgctggcttaacgtgatgaaccgcgaacagcagtattacccggatataaaagcagatggcagcatcggcccgcaaaccttacatgcgctaaattcctatttgtcgcgacgaggtaaagaaggagaagcggtgttagtgaaagcgctcaactgcagtcagggagcttattatcttgatatctgcgaaaatcgccggaaaaatgaagagtttatttacggctggattaaaaaccgagtgacatagttggtacggctgaatttataataaaagactcatggatgagccttttattacccgatgaaactatttgagtttcgtaccgccaaccgcgtttttaactttctctccgagaatttttaatatgggtccagcaaaaactccgcctaaaccggcggctaacagcaccatattaaagctaaaccctttttcgatagcaatagcgctaaggagaaaactggtaaagcaagatatgaccacctgcgtcaggcaggtcataatcccctgatgtgattcgccatcttcttctttattcctgcgaagaaggaaactgacgaaaccgccccaggcgccaatagagataatggtcagaagtatttccacttccagtagcacaacttccgttgtttctaaatgattaggtatagacataatcgctcctgaataactaaagttaaaaaagactcatcaggagtgtaagtggcagagtcgcggaaaggtaatcaaagaacatcaagactaaccacatcatctcaatgacggtaaggtgatgaaacttaccgtcggaatgatgacagcgtatgcaacatggaaaccgtttcatttatcgctgatatatttctactgtttttgttccatgaagcataaacctgcacggacttaaacattaattcaggtggaggttgaatgaaatttatatcgtatttacgctgatttttataaaacagcgctagttttaaaggcaatagcgcaattaatgtggttctttctaccatgctaatcactccagtgatggagtcgctacaatagcctatagctcgggaaccacgataataaacatcatctttaaataatccattatcagtaatgatagaaggagaagagatacccggttgatacatggcatggcgggaagagtagaattgatgtaaagaaagctgcgacagttcgctgaataaatggcctttggcgcaaatacagacaaagtttctaaagctatcaataacttgattatcgagtccggcctcaaccaacggttcagaaccgatcgataaatcacattgtgccgtcagtaaaagctctttagctttatcgcggctaatgttgcgggacgaaaaatggttgataacgctctgctcgaaaagcgcgctaccgaacagttgggaaaggtaatagctttcgatgaagtcacttccaaggatcgtaatccgggcatcatcggccttgcttgcagtctgaaaggtattatcgacaagcgacatagcctggcgaaaactatggtggatttcgatcgctttcgccgttggcagtaaaccatctttgcttctgacaaacagctcttgctcatagaagttttgcagacgtcttaatgccagagagaccgctgcgggagtgatggccaattttttcgccgccttcacggcattacctgccgaaatgacagcgtcaagaaccttgattaaattataatcaaagcccttattggcacctttcgatcccatccactgtcagcctcttttatcgaaaaaagcaatatagataatactcaaaataaatcaaatccggacatgctaaacaaagtatagcgtttctattcaaggctgagattgggacagaaaaaagcctgaacagggatgttcaggcttgtgctaataacgtggataaacgcaattaacgcgttaaatcatcaaagaattttttcacgccatcgaagaagcttttggaacgcgggctatttttttcccccgtagggccgccaaaagtttcctgcaactctttaagcaattgcttctgcttgtcgttaagacccaccggggtttcaactaccacgcgacacaacaggtcgccctgagcgcctccacgtactgacttaacgcccttgccgcgcatgcggaacagtttgccagtctgcgtttcgccaggaactttcaggtttacgcggccatccagcgtcggtacttcgatctcgccgccaagcgcagccattgtgaagttaatcggtacttcacaatacaggttattcccttcacgctcgaaaatcgcgtgctgtttcacctgtacctgaacatacagatcgcccgctggagcgccatgctcgcccgcttcgccttcgcctgccaggcgaatgcgatcgccggtgtcgacgccagccgggattttcaccgacaaggttttggttttttcgacacgaccgtgaccgtgacatttattgcacggatctttaatcagcgtaccgcgtccctgacagtgtgggcaggtttgctgaacggcaaagaagccctgacgcatctggacctgaccagagccgtgacaggttgggcaggtctgcggctgagtaccggatttagcgccgctgccgtggcagacatcacactcttccagcgtcgggatgcggatttctttggtgacaccacggaccgcttcttccagcgtcaattccatgttgtaacgtagatctgcaccgcgcgccgcgcgctgacgaccacggccgccgccgaagatatcgccgaacacgtcgccaaaaatatcgctgaaatccgcgccgccgccaaagccgccgccgccgaaaccaccgccgcccatgccgccttgttcaaacgcggcgtggccgtactgatcgtaggctgcacgcttctgggcatcagtcaggacttcatacgcttctttgatttctttaaatttggcttcggcctctttgtcaccctggttacggtccgggtgatacttcatggccaggcgcttgtacgcctttttgatttcacgctcttccgctgttttggaaacgcctaaaatctcgtaataatcttgctttgccattggtgtttttcagccccttaacatgcgtgcacgggcggagaggaaacctcttcgcccgtgccagtattttacccgttcaaagggcgattattttttgtcttttacttcttcgaactcagcgtcgacaacatcgtcgtccttcgcattgctctcttgagcgtcagcgccgccagcctgctgctgagcgtgctgctgctgagcgatttccatcagcttctgggaagcctgggccagcgcctgcatcttcgcttcaatgtccgctttgtcttcacctttcagggaagtttccagtgcggtcaacgcagactcgattgcagttttgtcgtcagccggcagtttgtcgcctgcttcttcaacctgcttacgggtgctgtgcagcagatggtcgccctggttacgggtctgaaccagctcttcgaacttacggtcagattcagcgttagcttccgcttcgcgaaccattttctgaatttcttcttcattcagaccggaagaagctttgatggtgatcttctgctctttaccgctgtttttatctttagcggaaacgtgcaggataccgtcagcatcgatatcgaaggtcacttcgatctgcggcataccgcgcggagctgggttaataccatccaggttgaactgacccagagatttgttatctgaagcgcgtttacgctcaccctgcagcacatggatggttaccgcagactggttgtcttccgcagtagagaacacctggctgtgcttggtcgggatggtggtgtttttgctgatgagcgcggtcatcacgccgcccatggtttcgatacccagcgacagcggggtaacgtccagcagcagaacgtctttaacttcaccagtcagtacaccaccctgaaccgctgcgccgatagccacagcttcatccgggttaacatctttacgcggttctttaccaaagaactcggcaactttcttctgcaccatcggcatacgagtctgaccaccaacgagaatcacgtcgttgatatcggaaacggacagaccggcatcctgcagggcaactttcagcggctcgatggaacggttaaccagatcttcaaccaggctttccagtttcgcgcgagtcactttaatgttcatgtgtttcggaccggtcgcgtctgcggtgatatacggcaggttaacgtcggtctgctgagcggaagacagctcaattttcgctttttctgcggcttctttcagacgctgcatcgccagcgggtcgttgcgcaggtcaatgccctgctctttcttaaactcgtcaacgaggtagttgatcagtcgagtatcgaagtcttcaccacccaggtgggtatcaccgttggttgccagaacttcgaaggttttttcgccgtcaacttcgtcgatttcgataatagagatatcgaaggtaccaccaccgaggtcgtataccgcgatagtacggttgccgacttctttgtccagaccgtaagccagcgcagcggcagtcggttcgttgatgatacgtttgacttccagacccgcgatacgaccggcatctttggttgcctgacgctgagcatcgttgaagtacgcaggtacggtgataacagcttcagttaccggctcacccaggtaatcttcagcggttttcttcattttcttcagcacttcagcagaaatctgcggcggcgcggttttggtgcctttcacatcaagccaggcgtcgccattatctgcggcaacgattttgtacggcatgatggaaacgtcacgctgaacttcttcatcctggaagcggcgaccaatcaggcgtttaatcgcaaacagggtgttttgcgggtttgtcactgcctgacgtttagccggctgaccaaccagagtttcaccatcctgggtataggcaataatagaaggcgtggtgcgatcgccttcggcgttctccagcacgcgagcggtagtgccatccataatcgctacacaagagttggtagtacccaggtcgataccaataattttacccatctaaacgtctccactaaaaattcgatcaacatgtggttgtgaacctgtaataagggcgaaacgtgcggtttcaactgccctgacatcattttttttcaggttcttcactgcggttgactacaagatggggtcgcccttgttttcctcaagggggaggcgcaaaaaaaattttatgacaaaacggattcatgggagcaatgcagacatcagacgaacaacctgcgccgcataacccatacacaacataaatagtaaataagaacatattcattggatatcgaacatgttcgacgaagagttcgcgattatcgcggcgtaaggtaaattgctgaaaaataccccgccagatcatagacagtaaccacgcgcctcattattatgccgcgccccaccgcaagaggcggggtaatgcttccctttctaatcattattttgaggaattatgggcaacactaagttggctaatccggcaccgctgggccttatgggctttggcacgaccactattctgcttaacctggcgaatagcggccttttcgcattcgatgtagctatcctggcgatgggcattttttacggcggcattgcgcaaatttttgccggcctgctcgagtataaaaaggcaacacctttggtttaaccgcttttacgtcctacggctccttctggctgacgttggtcgcgatccttctgatgccgaaaatgggcctggctgatgcgccgaacgcgcacttcctgggcatgtatctcggcctgtggggtatctttacgttgttcatgttcttcggcacgctgaaagccgcgcgtatgctgcagttcgtcttccttagcctgacggtgctgttcgcgctgctggcgatcggccacctggtcgataacgaagggattgttaaaattgccggttgggtcggtctggtatgtggcgcgagcgctatttacctggcgatgggagaagtgttgaacgagcagttcggccgcaccgtcctgccgattggcgagccacgctaatggtctgccgccgcccggaaaccgggcggcggcatttaatttaacgctgcagttctccttgcggtaaaaccgcttgcgtcgtcaacccctgccgaagccagatacctaaccccaaccccatcagggatagcgccagtacgtaccaggccggcgccatcggcgagaccccatcagcatagtgacggcaatcggcgtcaggccgccgaaaatggcatacgacaggttgtaggaaaacgagatgccggtaaaacgcacttccgccgggaaggcgcgcaccatcacgtaaggtaccgccccaccacgccgacacacagcccaccgtcccatacagcagaaacagccgctgcgggctggcgccggaaaggtggtaaaaggcccaactggcggccgccaacaacaggctaccgacgataaaagtgcggctggcgccgaaacggtctgccgccagaccggcgagtagacagccgatgcacagcataatcgtggcgatgctattggcctgcagggtaatcgccggcgcaaagccataatgtttttgcagccagaccggcgacatcaggatcaccaccaccacgccggcggacagcagccaggtgagcagcatcgaaacgatgacggccttctggtgcttaagcgccaccgccttcaccggcaactcctgcgctagcgctttacgcttctgcatctcaagaaatatcggcgtctcctgcagccaacgacgcaggtacatcgccaccaggccaaaaacgccgcccagcaggaaaggaatacgccagccgccgtcgtggataccctgcggcgtcatgctggtattgataagcgtcgccaccaccgaacctaacaggatcccgacggtcaaccccgcggtcaaggtaccgcaggcgataccgatgcgtttttccgggacatgttcggccacgaagacccaggcgcccggcacttcgcctccaatcgccgccccttgtaaaatacgcatgagcagtaatagcagcggcgcaacgatgcccatcgaggcataagtcggcagcagaccgatcgccagcgtcggcagcgccatgagcagaatgctgagggtgaacatttttttgcgaccgacgaggtcgccaaagtgggccatgataatgccgccaagagggcgcgccagataacccgcggcgaaaataccgaaggtctgtacctgacgtagccattccggaatatcggccgggaagaacagttcgccgacgacggcggcgaagaagacaaagataatgaagtcataaaactccagcgccccgccgagggcggccagcgtcagagttttataatcctgtcgattcagtgctcgggtgtgttgtgacataactggcgcttcgtccgcagtaatattacgcaatgtgtaaagtaaaaaacactataccgtaaataaaacagcacaccaccggcgatgcaggttatatcagcaatgcattaaattcaggataaagtttcacgtcgtgcacttttagggcgaaaagctgctacaacgctcgcttccgtctccacatacggcccctcaagcaactgtacacaataaggtacacttgcaaagacaccatgtaccagcaccttaccgtccgcgtctttgactccttcgagagtctcctgaatcgctttcggctggccaggcaggttgaggatcagcgcctgtttgcggatgacgccaacctgccgggagaggatagccgtcggcacaaagtgtaggctaacctggcgcatttgctcgccgaaaccgggcatgacgcgatcggcaatcgctaaagttgcgtccggggtcacatcacggcgcgccggaccggtgccgccggtggtcaacaccagatgacagcccatctcgtcaaccagctcgcacagcgtttgttcaatgatgggctgttcatcagggatcaggcgagtttgcagttcaaagggcgttgtcagcgcacgcgccagccactcttccaacgcaggaatacctttgtcctggtaaacgccgctggaggcgcggtcagaaatggaaactaagccgatgcgtaatttattcatattcattccgttcaaatagtgcaattaagcggaatgatacacgctggagagaattacagacaggattcaaaagaagtagcgtgaccggagacccggtcacgcaggaatgattacagcagatcgccgatcattttttccagtttttcctggtcgatggcaaacttacggataccttccgccagtttgtctaccgccatcggatcctggttgtgctgccacaggaactgggattcagtaatgcgttccggacgcgctttcacttcgccgctgaacgccagtttacgttcaacagcgccttcgctttccgccagctctttcagcagcgcaggggcgatggtcagacggtcacaaccggccagctcaaggatttcgccaacgttacggaagcttgcgcccatcactacggtttcatagccgtgctgcttgtagtactcgtagatttcgctaacggaaaccacgcccggatcttctgccggcgcgtactctttcttatccgtgttcgctttgtaccagtcgaggatacgaccaacgaacggagaaatcaggaagacgcccgcttcagcgcaagcgcgagcctgagcgaaggagaacagcagggtcaggttacagttgatgccttctttttccagctgctcagcggcacgaatgccctgccaggtcgaagccagtttgatcaggatgcgatcattgccgataccggcatcgttatacagtttgatcaggcgtttcgctttcgcgatagaggcttcggtgtcataggacagacgggcatcaacttcagtagaaatacggcccgggatcagtttaaggatttcgagaccgatgttcaccgccagtttgtcggaagcatcgataatctgctgcgcgcgatcgctgctctggccgcgagcccaggcaacagcgtcgtcaatcagcttacggtactcaggaatctgagccgcgccgaggatcaaagaagggttggtggtggcatcctgaggctgatacagcttcattgccgcgatatctccggtgtcagctacgacagtggtgtactgacgcagagaagtcaatttatccgtcatgatagtgtttctcttaaacagcagttaaggggatgtaaccggtctgccaagatgataacacgccatagggtcagcgcaaccgccgacaatgcaagagcgcagagtgtgataaactcgacatattaattatctgaatgctaaaggattgtcaccggagtggtagcgcttacaccgcgcgccggcatggacaagaggacgtttaatgcctgattttctctcgtttatcaatgaaatactctggggctcggtaatgatttacctgttactgggcgccggtatttggttcacctggcgaacggagtttattcagttccgttatattcgccagtttggcaaaagtcttaaaaaaagccttcgcccgcagcccggcggattaacatccttccaggcgctgtgtaccagcctggcggcgcgcgtcggtagcagtaatctggcggggtggcgttagcgattgccgccggcggccccggcgccgtgttctggatgtgggtctccgcgctactcggcatggccagtagcttcgccgaatgttcgctggctcaactgtacaaagagcgcgatggcgaaggccagtttcgcggcggcccggcatggtatatggctcgcggccttgagatgcgttggatgggcgtggtcttctcgattctgcttctgctggcctatggggtgatttttaataccgtgcaggctaactcggtggcgcacgctatcgcctatgccttcgatttaccgatggttgtcgtcggcgccgcgctggctgccgcgacactgctgactatcgtccgcggattacgcggcgtggcgcgattgatgcagtggtttgtcccactgatggccctgctgtgggtcggcaccagcatgttaattggcctctggcatttcgctgccctgccggcggttttcgaaaccatcttccgctgcgcttttggctggcaggaagcggcagcaggcgcggtgggttataccatcagccaggcgcttaccggcggtttccagcgcgggatgttttccaacgaagcgggcatgggttcaacgccaaatgccgctgcaacggcggcctcatggcctccgcatccggcggcgcagggcatcgtacagatgattggcgtgtttatcgataccatcattatctgtaccgccagcgcggtaattatcatgctggcgccgcgtgaaaaccgcgatactgtggtcagcggtattcaaaccatgcagcacgcgatgggcgatcttattggcagttggggaccgggtctggtcgccgccgtactactgcttttcgctttcagttcgattgtcgccaattatatttatgccgaaaataatctgatcttcctgcggctcaataagccgctgcatatctggacgctccgggttatcaccgtattaatggtgctggcaggcaccctggtgagtctgccggtggtctggcaactggcggatattattatggcgctaatggccatcaccaacttaacggcgattttgctgctgtcgccaacggtgcggctcctcgccagcgattatctgcgccagcgcaaactcggcgtacaaccggtcttcgaccccgctcgctatccggaaattcagcaacatctggccccggctcctgggatgagataccgcgcgaatagcgcggtaatcgcagcaatcgatcccaccgtactctttttttgttaaaatttgtcgaaattccctgcaaggactggatatgctgattctgatttcacctgctaaaacgctcgattatcaaagcccgctggcaacgacgcgctatacccagcccgaactactcgagtattctcaacagcttatcggtatcgcccgtaagctgacagcgccgcaaatcggtaagctgatgagcatcagcgataagctggccgatctcaacgccacccgttttcacgactggcatcctgactttacctcgcagaatgcccgtcaggcgattctggcgttcaaaggcgacgtttataccggcctgcaggccgaaacctttagcgaagcggatttcgatttcgcccagcagcatctgcgcatgctttccgggctttacggcgtgctgcgcccgctggatttaatgcagccttaccgtctggagatgggcattaagctggaaaatccgcagggtaaggatttgtatcatttctggggcgatgtcatcaccgataagctcaatcaggcgctgcaggcccagggcgacgatatcgtcatcaacctggcgtccgatgagtattttaaatcggtcaaaccgaaaaaattgcagggccagttgattaagccggtgttcctcgatgagaaaaacggcaaattcaaggtgatcagcttctatgccaaaaaagcgcgcggtctgatgagccgctacatcattgaaaaccgtttaacccgtccggaacaactgcagcattttgatagtgaaggctatttctttgatgcgcaggcatcggagaacggcgaactggtgtttaaacgccacgagcaataaaaacgacatcacccctgtccggcaagcgacaggggcgttttcagtcttaattagcccatcatcagcttacgcagcgcggcgaaatcggccggcagattatgcgacagcagcggcaggtcggcgcggtcggccagctccttcggcagcggcagcgtctcctgcagaatctcttctacgctttctttgaatttcgccggatgcgcggtaccgaggaacaacccgtactcgcccggttgcagctgatcgcgcagcgcgcgataagcaatagccgcatgcggttccgaagtatagccgatggactttagttcacgcatggtcgctttggtggtttcatcatcaaccgcggcatagcccagttcattcagacgccatattttacggcggaacagctcttccacgcgcggccagttattcggttggctgacgtccatcgcgttagacagggtcgcctgcgtcgccttcggcgcccagttgccatcctgcaggaagcgcggcacggtatcgttggcgttggtagcggcaataaaacgcttaatcggcagccccagcgatttcgccagcaggccggcggtgagatcgccgaagttgccgcttggcacggacaccaccagctgattgcgggcctcctgcggcagctgcgcgaccgcctcgaagtagtagcagatctgcgccagcaggcggctgatgttaatcgagttggcggagttgaggccgagcgcgatcttcagttcttcgtcatcaaacgcctgcttaaccagcgcctgacaggcgtcgaaatcgccgtcaatcgccacggtttcaatgttgcctccgagggtacagaacagcttctcctgcagcggactgatcttaccgcgagggtagagaataaccactttgacgttcggcaggccgtagaaggcgtgcgccacggccgcgccggtgtcgccggaggtagcggtcaggatcgtcaccggcttatcgcccgcgatatgcgtcagcatctgggccataaaacggccgccaaaatctttaaacgccagcgtcgggccgtggaacagctccaggcagccgacatcatcctgtacttgagtgaccggcgccgggaaagcgaatgccgaagccacgcgggcctgcagttcattctgcgggatctcgtcgccaataaaggccgacaggattttcgcgctgcgggtcacgaaatcctgctccagcatttcgtcgatttcggtcaggttgaattccggcagatcgtgcggaaagaacagccctgttgtttgccaagcccttgcgtcacggcctgcgcaaagctgacctgttcgttatgatcttttaagttatacagtttcatcacttatcccactactcgagcgcccgccgtgtccagccggcaaatatgaacgaagccttcctgattttgcagataatgcgcggccagccagtcggcgacgcgctgcgcggtgtccggtttatcgcacaacgcgaacagcgtcgggccggagccggaaataccgcaagcctgcgcgccgatttccatcgccgcctgacgcgcttcgctgaagcccggcagcagtttggtacggtacggttcggcgataacatctttcattaactttgccgccagctgcggctgacggctatagcaggcgtgaataaaccctgccagatggcgaccatgggcgatacagtcctggcggcgatactgcgctggaagaatcgcgcgcgcttcggcggtagaaaccttaatgcccggataggccagcacccacaaccattcatcaaaacccgggatctgctgactgatgatgccattttcttcgatcatcagttgcataccgccaaggtaacacggcgccacgttatcatagtgaacgctgcctgagatgcgcccttccatctcgcccatcagcgccagcatccgattttcattcagcggcttaccgcagtgttcgttcatcgccaccagcgcggcgaccaccgaacaggcgctggagcccagacccgagccaatcggcatattcttttccagggtcatcgccaccggaaccgttttaccgatctcgcggcaaaaggcttcccagcattgatagacgatattttcctgcggcgccgagggtaatttgccggcgaagcgccctacattacacaggctaaactccgccgccgcctctaccgagacgttatccccagcaacgtgccgtcgaccggcgtcaccgccgcacccagcacatcaaacccgacgctcatattggcactggaagccggggcgtatactttgaccatcttaaactcctaacttccatgacagggtacgcaacaggtcggcgaatacgccagccgcggtgacgtcgttacccgcgccatagccgcgcagcaccagcggcaacggctgataatagtggctgtaaaatgccagcgcgttctcgccgttcttcaccttatacagcggatcgttgccgtctacttcggcgattttcacccggcagacgccatcttcttcaatattgccgacgtagcgtaagactttaccctcgtcgcgcgctttagcaacccgcgaggcgaattgatcgtcaagcgtcggcaggcgcgccataaagctttcgacatcgccgctggcgtcgaagtcggcaggcagcgcaggctcaacgataatatccgagagctccagctcgcgcccggtttcgcgggcaaggatcagcagcttgcgcgccacatccacgccggaaagatcgtcgcgcggatccggttcggtatagcccatctcgcgcgccagtttagtggcttccgaaaggctcatgccctcatccagcttaccaaaaatgaatgaaagcgaaccagacaggatgccggagaagtgcagcagttcatcgccggcgttcagcaggttctgcaggttttcaatgaccggaagacccgcgccaacgttggtatcatagagaaacttacgtcgtgagctgctggcggcgtggcgtaactggtggtagtaatccagcgaagaggtgttggcctttttattcggcgtcaccacatggaaaccttcacgcaggaagtcagcgtactgatcggccaccgcctggctggaggtacagtcaacgataaccgggttcagcaggtgatactctttcaccaggcggattaaacgacccaggttgaagggttctttcgcttccgcaagttcgctacgccagttttccagattcaagccatggacgttcgtcaacagcgcctgcgaattggcgacgccgcatacgcgcagatcgatatgcttacccttcaaccagctctgctggcgtttaatctgttcgattaacgcgccgccgacgccgccgacgccgatcacgaagacttcaatgacctggtcggtgttaaacagcatttgatgcgtcacgcgcacgccggtagtcgcatcatcattgctgacgaccaccgaaattgaacgctcggaagagccctgggcaatcgccacgatattaatattggcccgcgccagcgcggcgaagaatttcgccgagataccgcgcagcgtgcgcatcccatcacctacgacggaaatgattgccaggcgctccatgattgacagcggctccagcagtccttctttcaattcgagatagaattcctcttccatcacccgcttcgcccgcgcgctgtcgctctgcggcacgcagaaactgatgctgtattccgaagaggattgggtaatcaataccacggagataccggcgcgagacatggtggcgaaaacacgcgccgccatgccgaccatgcctttcattcccggtccggaaacgttgaacatcgccatattgttgagattcgagatcccttttaccggcaggccgtcttcatcaaggctggcgccgataagcgtccccggcgcctgcggattaccggtatttttaatcaggcatgggatctggaactgggcaatgggggcgatagtacgcgggtgcagcaccttcgcgccgaaataggagagttccatcgcttcctgatacgacatggatttcagcagccgcgcatccggcacctgacgcgggtcgcaggtatagacgccatcgacgtcggtccagatttcgcagcagtcggcgcgcatacaggcggccagcacggcagccgagtaatcagagccattacgccccagtaccaccagttcacccttttcgtttccggcggtaaaaccggccatcagcaccatgtggtctgccgggatttggctggcggcgatacggcgagtggattcagcaatatcgacagtggattcaaggtagtggccgacggccaacagtttttcgaccgggttaatcacgcttaccttatgaccgcgcgcttccagcagcgccgccatgatagcgatagagagcttttcaccgcggcagatcagcgaggcgttaacgccatccggacactggcccagcaggctgataccgtgcagcacgtgtttaatctgcgcgaattcctgatcaacgaaggttttcagctgcgcgagcgggaagccaggctgaatgtcggccagcccctgcagcaggtcggcaaagatgcgttcggcgtcggcaatattggtcagagcgtcctggccgctgatggttttttcaatcatcgcaaccagatggttagtaattttcgccggggcagacagcacggtcgcaacctgcccctgcctggcattgctctccagaatatcggcaacccgcagaaaacgctctgcatttgccactgatgtaccgccgaacttcaacactcgcatggttcttaccccttgatctcttgtcaaaaaaaaagcccgcactgttcaggtgcgggcttttttctgttgtttcctgtacgcgtcagcccgcaccgttacctgtggtaatggtggtggtgataatggtggtaatcatgccgatgcgattcatggatgttgtgtactctgtatttttatctgtcttgtgtcctgcctatattggttaaagtatctgcctgcttaagtcaacgaatttctaaattggtccctttttggccaacgttgccattccgccacgacggcccgagaattccgccgcattaccagaaggtcacgcttgcaatcagcacataccaccataaaaaaaacttattacagaatcttattccggcagatttttttcaatatcgtgcaacaaacgatgcagcatcgcggtgtcgcgctgctgcaacaggccgattcgttgctgtagccagtcggccagctttatgtcgtcatcgacccccaatcgtccaagcagcgaaagggcccgctgacgtagcgcctgcagttgtttttcgtcggtttcaggctcctgaacagaaacttgctgttgcagtgagctcagctgatagcaatacaccatcaccgattgcccaagattcaaggagggataatcggcgaccattggcacgccggtaagcacatcggccagcgccagttcatcgttagttaatccggaatcttcgcggccaaagaccagcgccgcatgtttcatccattgtgctttttcttccagcagcggcagcaactcttgcggcgtggcgtagtagtgaaaacgcgcgcggctgcgggcggtagtggcgacagtaaagtcgacatcgtgcagggcctgctcaagcgtcgggtaggtttttatactatctaaaatatcgcccgaaccatgggccacccagcgggcggcaggttgctgatgcgcctcgctatcgacaatccgcagttcactgaatcccatggttttcatcgctcgcgccgccgcgccgacgttctcagccctcgcgggcgccaccaaaataatcgataaacgcattgtgcttctctttaacctcttacgcggcgcaaatctgcggttgccccccattttacgcggcgaaaatttacaaatttgcaacaaaaatcactaaaaatgggctttattactcttaaaaaaaactaaactgttcacatcgagcaccaatacggagtatgttaacagaacgcatttatccatatgtttggcaatgatatttcagttttcattcgccgacagactttggattcactgcatttattaattcatagttgcaactaattgagctgtgtaagaaatgtgacgataagtcgcaaatcgatgcaatgatttcacaagactgttaacgtgctacaattgaacttgatatatgtcaacgaagcgtagttttattgggtgttcggcctctcttagcctgttatgttgctgttaaaatggttaggatgacagccgtttttgacaccgtcgggtccagagggaaagtacccacgaccaagctaatgatgttgttgacgttgatggaaagtgcatcaagaacgcaattacgtactttagtcatgttacgccggacatgttaatttgtggcatgtaccaggcaggtcagggactttggtacttcctgtttcgatttagttggcaatttaggtagcaaacatgcagaccccgcacattcttatcgttgaagacgagttggtaacacgcaacacgttaaaaagtattttcgaagcagaaggttatgatgtattcgaagcgaccgatggcgcggaaatgcatcagatcctgtctgaaaatgatatcaacctggtgatcatggatatcaacctgccaggtaaaaatggtcttctgctcgcgcgtgaactgcgtgagcaggctgacgtcgcgctgatgttccttaccggccgcgacaacgaagttgataaaattcttggcctcgaaatcggcgccgatgactatatcactaaaccgtttaacccacgtgaactgactatccgcgcacgtaacctgctctcccgcaccatgaacctgggtaccgtgagcgaagagcgtcgcagcgttgagagctacaagttcaacggttgggaattggatatcaacagccgttcattggtgagcccaaacggcgagcagtacaagctgccgcgcagtgaattccgcgcgatgctgcacttctgcgaaaacccgggcaaaatccagtcacgcgcagagctgctgaagaaaatgaccggtcgcgagctgaagccgcatgaccgtaccgtggacgtgaccattcgtcgcattcgtaagcatttcgaatccacgccggataccccggaaatcatcgctacaattcacggtgaaggttaccgtttctgtggcgatctgcaggaataatttcgtttttcctgctgtgataatgcaaaacggcgcctgtggcgccgttttttttgcggttttattagcagatacgtgtcgtatcctcatcaataaaacatcgctatatttatttactccacggcatgatcggcacggcgctaatggcattcttcggcgagccgtcgaccactttatcggaataggtcagatacaccagcgcattgcgtttagcgtcatagaagcgaacgacctgcagttttttgaacaccagcgaggtacgtttctggaacactacatcgccctggcttttgccgtttttgattttatccgtcagctcaatcggcccgacctgctgacaggagatagcggcgtctgaggtatcctccgccagccccaacccgcctttaatgccgccggtttttgcccggctgatatagcaggtgacgttctgtacatcgggatcgtcgaaggcttcgaccacgattttgtgatccggccccagccatttaaataccgtatctacggagccaatttgctcggcgtgcgccagttggcctgcggccagtaagaacaatcctgccactaacttcttgtatttcatattgttaccatttcttaaaattccgctgcgtaataatcacaaacgctatggaaaaggtttaaagatcacagctttacaaaattaccaacgatatccagcagataatcgcatttaaaagcaaaaaaaacactgaatgctaaaacatcaaaaaatgctattatccgctaccttaatataggtacctgagtttaaaggatgggacattttatggatcaagctgggattattcgcgatctcctgagctggctggaaggtcacctggatcagcccctctcattggataatgtggcggcgaaggcaggttattccaagtggcatttgcaacgtatgtttaaagacgtcacgggtcaagctatcggtgcctatattcgcgcacgccgtctctccaaatccgctgttgcgctgcgtctgaccgcacgcccaatcctcgacattgcgctacagtatcgtttcgattctcagcagacgttcacccgtgcctttaaaaaacagttcaacctgaccccggctctctatcgccgttctccggactggagctcatttggtatgcgtccaccgctgcgtcttggtgaatttaccatgccgaagcatgagtttgtcaccctgaacaccacgcaactggtcggcgtgactcagagctatacctgtaagctggaagagatttctgaattccgtaaccagatgcgcgttcagttctggcgcgaattcctcggcaacgcgcccagcattccgccgacgctgtacggcctgcatgaaccgcgtccaagcctggaaaaagatgacgagcaggaggtcttctacaccaccgcactgacgccagagctggcgaacggccacctgcataattcccatccggtgattctggaaggcggcgagtatgtgatgttcacctacgaagggttaggtaccgggctgcaggagtttattctgacggtgtacggcacctgtatgccgatgctcaacctcacccgccgcaagggtctggatattgaacgtttctatccggaagatgataaccggaaccagaccacgccaattcagctgcgctgcgagtacctgattccgattcgtcgttaacgctgcagttcgtccatcgcgggggcatcgagatgcgagacgtcccccgcggtctccaccacccatcctgacgccagccacgggctctgctggtaatcaacgcgtgaaatcgaacagttgcgcaggcgcaaacgacgctccgcataagcaggcagcccgaggatcgtgctcaccagacagccgagcgccatcccatgactcaccagcagcggccggctacctggcggcaactccagacaggatgatagcgctgcgcgcatacgctcgctcagctcctgcatggattcgccctgcggaatgcggccatccggcgtaccgttgaccagctgacggcgccagccctcttcttcttcgctaagtgagtcgatatggcgcttctccagcacccccatatccagctcgcgcaggcgtggatcggtgaccacgccgcaaccgcaggcttcggcgataatttctgccgtacggcgggtacggccgaggtcgctggcgataatatgggtaatccccagcgttctggcgcgctcgccaacctgccatgcctggcgctcaccgtgagcggtcagcggactatcggactggccttgaatacgtcgctcggcgttccactgcgtttcaccgtggcgaacaaggtatacctgtaacatgcttattttccgttctgaactcttcatcattcgacgagcagcgcgaacggctgccgccagagtgatttagagtatactgcgatgacgttaattaattctgagttgttttgattatgcaccatgttgtctcagctaccactaatcccgccaaaattcaggcaattctgcaggcttttaacgagatcttcggcgaaggatcctgccatattgagtccgtcgccgtcgagagcggcgtgccggaacagcccttcggcagcgaggaaacgcgggctggcgcacgaaatcgcgtcgctaacgcccggctcgcacagccggaagccgatttttgggtggcgatagaagccgggatcgatgaaggcagcaccttcagttgggttgtgattgagagccgacagcagcgtggcgaagcgcgctcggcaaccctaccgctgccggaggcgatccttgcgcaggttcgtgccggggaagcgctggggccggtcatgtctcaacataccgggatcgaccagataggccgcaaagagggcgctatcggcgtctttaccggcggcaagctgacacgctgtagcgtttaccatcaggcggtagtgctggcgctaagcccattccataacgctatttatcgttaagcagcgtctgttccagccactggcgtagctctaccggcgccgatttcagactatttgagccgcgggtaatcgtggcgataccggcgccgagttcgtttttcagctcacgctggctcatctcgccgcgcagtagctcctcgataatgcgcacccgggtacccagcgcttcgcgctcatcgggcgtcagcatcagctgcagtaaaggcaagtgaagatcttcggtataggcctgctgcaacagcgccacgaagcgcagccactcctgatggcgttgttcggccacggccgctgaatagggagattgttgggtcatgttacgtcgccatgttgagacgggcagccaggctgcccgtcgaatgtactcttcaacgagtacaaagaataacatacttccggacgatcagtaacgctgttgccattcggcgtcgctcagcaagttctcctgcttgcccataaagtagcggtaataggcatcgtaagagaggacgttttttacgtacccgcgggtttccgagaacggtatactctcgataaatgccaccgcatcgatgcgcccggcgctattaccctgccaggtgcgtacgcgtcctgggccggcgttataggccgcggaggcgtaaatgcggttattgccgaactgctggtagacgtactgcaggtagctggtaccgatgttgatattggtttccggatccagcagctgcgacgggccgctataaccaggaatactgaacatgctgacggtgtgcgtcgcggtgcccggcataatctgcatcaagccgctggcgccgaccggtgaacgcactttcgggttccaggcactctcctgacgcgcaatcgccatcgcgtagctctgcggaatatctttgccgctaatgtaacgcgcgaatagatcgttgtacgccagcgggaagcgttcttcgagttgatcccacaatttacccgcgatcgtcgcctgtacgctgagatcccaccagtgttgatcaaaagcgtaacgcgccagctgcgcctgctgcgatttggtccggctgctcaccaggttcgcccattcgctgcgcgcggtgttgtccatgttccagtacatcagctcgcgaacgcgcgccatctcagggccagaggccagcgccgggtcgatagtgccggaggctttatcaatgcggaaggtgtactcttcgccgagacgttgagcggcaaccatcggatagaagccgcgttgctgcatcagcgaatgcaggatcgtcttcgcttcgtcatcgcgcccgcgctccagcagcagatccgcctgccagtatcgccactcgtctttctctttcgcctccattggcaaacgcgccagccaggtgttcagcccatggcggtcgccgttgccgagcgccatacgtacccggcgttccaccagcgaggttgattgcgaacgcatgatcgcatcatctcgccactccgcctgcgcttcggtcacatcggtgcccatcaggcgccaggcgacgatatcgcgcagctcctgggtttgatcgtcattcaactgctgcgcctgcaccagcgatggaatcatcagacgggcgttttccacatcctgacgcgcgacgctggcaaaagcgaccgccgccatctggcgggtaaagtcggtggccccggtggtgcgggcaaaggtcatcacgctattgggatcgttggccaacgccaccaccgccgaagcgatgctctgatagtttgacggcatctgctgagcaagcacgcggaccagactggtattgccagccttcatcgccaggcgaattctttcgagataagccagcggatcctgctgcccggaatcacgccacgcgctgaacagcggatcgcaggcatttggctggctcttgccggtcagccacagctctttcgccccgctccaggcttcctgcgattggccgacgctgagtttggcgtagtagtagttacactgcgcttcggttgtcgccggtttatccgggctgaacgccagcaagccgcgccagtcggtacgccgcgccagctcattaacaaagcgtgatttcagcgaacgcgccgccggtagcgtcgggttcgccgcaatgaaattagtgaccaccagcggcggctggttcatcaggtcatcggtaatttgtcgatattgcaggtagggatacagcggataactgctgagcgtgggcatcaactgattgacgacatccatctggcggttgtcccacgcttgtttaatttgagcatagcggctgcgctgttcatccagtgaatccgcatgtgccagctggcttagcgtcagcagactcacgccggcagccagaagacgccatgccgtagttttggctttttccacaagctcttcctctagtttgatgcatcaccgcggcatcgtgccgcttcaaaaaaatcaggtattgcttagttatgctaatcagacaactgaaaacatgccatgtcctgaacatttttttacgcttctgtgaatcctgtcgcctcgctgggattaccgcgcgaaaaaggctacacttcgcctttgaactatctatcagaatagaaagaggcgaagtccaacgtggctcaattcgtttataccatgcatcgtgtcggcaaagtggttccgccgaaacgtcatattttgaaaaatatctccctcagtttcttccctggcgcgaaaatcggtgttctcggtctgaacggcgccggtaaatctaccctgctgcgcatcatggccggtatcgacaccgagatcgaaggtgaagcgcgcccgcagcccggcatcaaaatcggctatctgccgcaggagccacagctgaatccggagcacaccgtgcgcgaatccgttgaagaagcggtcgccgaagtggttaacgcgctgaaaggcctggacgaagtttatgccaaatacgccgagccggatgccgacttcgataagctagccgcgcaacagggcaagttcgaagagatcatccaggcgcacgacggccataacctgaacgtgcaactggagcgtgcggccgatgccctgcgcctgccggactgggatgcgaaaatcgccaatctttctggtggtgaacgccgccgcgtcgcgctgtgccgcctgctgctggaaaaaccggacatgctgctgctcgacgaacctaccaaccacctcgacgccgagtccgtcgcctggctggaacgcttcctgcacgatttcgaaggcaccgtggtggcaatcacccacgaccgttacttcctcgataacgtcgccggttggatcctcgaacttgaccgcggtgaaggtattccgtgggaaggcaactactcctcctggctggagcagaaagaccagcgtctggcgcaagaagcgtctcaggaagccgcacgccgcaaatctatcgagaaagaactcgaatgggttcgccagggcgcgaaaggccgtcagtctaagggcaaagcccgtctggcgcgctttgaagagcttaacaacgtcgaataccagaaacgtaacgagaccaacgaactgttcattccgccaggagcgcgtctgggcgataaagttctggaagtcagcaatctgcgcaaatcttacggcgaccgcgtactgattgacgatctgagcttctccgtaccgaaaggcgctatcgttggtatcatcggtccgaacggcgcgggtaaatccaccctgttccgcatgatgtccggccaggaacagcctgattccggcaccatcacgctgggtgaaaccgttaaactggcttccgtcgatcagttccgcgacgcgatggataacagtaagaccgtttgggaagaagtgtccggcggcctggatatcatgaagatcggcaacaccgagatgccgagccgcgcctacgttggccgctttaacttcaaaggcgtcgaccagggcaaacgcgttggcgagctgtccggcggtgagcgtggtcgtctgcacctggcgaaactgctgcaggtcggcggtaacgtactgctgctcgatgaaccaaccaatgacctggatatcgaaaccctgcgcgcgctggaaaacgccctgctggagttcccgggctgcgccatggttatctcgcacgaccgctggttccttgaccgtattgcgacccacattctggattaccaggatgaaggtaaagttgagttcttcgaaggtaactttaccgagtacgaagagtacaagaaacgcaccctcggcgccgatgcgctggagccgaagcgtatcaagtacaaacgtatctcaaaataaaatgcaaaaaggcaacgcaagttgccttttttaatgtttgctccctctcccattgggagagggccggggtgagggctacagcccgcagaggacctacccctgctcacccatcaactgtttcaccagctcaacgcatcgcaggaaccgggcgtcgtagtccgattcttccacatggacgaactcgatgccgttttctttcaacagcgacaccagcagcgtctgaaactctttgcgatctaccgaactaccgaggctacgcagcccatcggctacccacggcgtattattctccagcaggatcaccagatcaaagcggtattcatcgattaacgcctgtacgaacggatgttcgcggccttcgtacttcacgcagaaggcctgagtgctgacgaagtcggtatcgataaacgccaccttattggcgtatttcaccgcgaaatcaatgtactgtgcatgccccagcgcgattttatcgtaatcggaatactgcaacgccatttcatcgccgccaaggtgtgaaaagacgtaatcgcggccatattcccaggcgctggtggtattgaagatattggcgagcttattcaccagcgtcgattttccgctcgactcaccgccgaggatcgccaccgtacgcacaaagaacggttttacctcagtcggaatatattcccaatagcggaacgggttttcgcggatctggccgccgctgatactcatgaaggttcgcttcggatcgataagcacggtttcgatccccagatgctccagatactgcggcgcatcggcctcttctgaggtataaatccagtttggctcgattcccttttcactcatgaaggcgcggatcccgcggctccagacgtcccagccgtgtgggtacggctccatcccctcttcattgaaggcatggatgcgaatgtttttttgatatttaaaggtttgcagcagccagcgcagacgatcgggaaccgtcggctgttgcgacatggcgctctcttcgaacagttcgcggtcacgagtgtcgtcatagcccatgatgatatggagctcatcgacctggctacaggcgcgctgaatcagataaatatgcccggtatgcagcggataaaatttaccaaaaaccaccccgacgcttttttgtttgcgcgggaattcaaggccgaggaagcggtgtaacgcttcgagcttctgggcgctcgggcttttgattttcgcgtttaatagctgactgagataacctttggtcatcccgctggcttccgccacctgctgcagcgtacaacccttttgcttaatggcgtttttcagatagtcgaatgacgacatagtttatgcgtgcctcctgcaaactcgggtttgctacccgtcataccctgaagtatgacgggtatcattataagtcgtcaaaaacgctcagcgcatcggccagttttttcacgccaaagatttgcatcccttccggcgcttttttgggcacattggccgctggaacaatggcgcgacggaacccatgcttcgccgcctcggaaatgcgctcctggccgcttggcaccgggcgaatttcaccggctaatccgacttcgccaaaaaccaccagatcctgcggcaacggacgatcgcgcaggctcgagaccatcgccagcagcagcgccaggtcggcgctggtttcagtgacttttaccccgccaaccacgttgacgaagacgtcctgatcggccatctgcaggccaccatggcggtgcagcaccgccagcaggatcgccaggcggttctgttccaggcctaccgctacgcgacgcggattagacatcattgagtgatcgaccaatgcctgaatctcaaccagcagcgggcgggtgccttcccataccaccatgaccgagctgccagaggtaacttcatcgccgcggctgaggaagatggcggatgggttactgacttcgcgcaggccctgctcggtcatcgcaaagacgccaagttcgttgaccgcgccaaagcggtttttatggctgcgtaacgtgcggaaacgggaatcggcatcgccgtccagcagcaccgagcagtcaatacagtgttccagtactttcggaccggccagcgagccatctttggtgacgtggccgaccatcacaatcgccacgccgcgagttttggcaaagcgcgtcagataggccgcagtttcacgtacctgggccacgctccccggcgacgactggacatcagccatatgcatcacctgaatggagtcgatgaccattaactgcggcttttcttcatcggcaatctggcaaatttgctcgatgctggtttccgagagcatattcagattcgccgtcggcagcccgagacgatgcgcgcgcatcgctacctgctgcagggattcttccccggtgacgtacagcgttttcatcccttccgccagcttgcagagggtttgcagcaacagcgtcgatttcccggcgccggggttgccgccgattagaatggcgctacccggtaccacgccgccgccgagcacgcggtcgaactctttaaatccggtggaaaaacgcggcagcgcctccaggcttatctccgacagcttctgtaccttcgacacgccggcattcccggcgtagcctgacagacgttcgtttctcgccacctgcggcgaggcggcgatgcgcatctcggtgatggtgttccaggcatggcaggcgctgcactgcccctgccagcgcggataatccgcaccacattcattacagacaaatgcgcgttttggagctttcgccacgttaacctcttacttttgattcatgctgccggagagaatacagaatacccccatcaggtcagcgtggcggatggtgacttccgcctgttcattgacttttggtttcgcatgataggcaatgccgagacctgccgccttgatcatcggcagatcgttggcgccatcgccaatggctacggtttgcgccggcggaatttcatatttttccgccagtttacgcaaagtgttggctttatatttggcatcgacgatgtcgccgatcacgttgccggtgagcttcccgtccataatttccagctcgttggcgaataccgcgtcgagatgcagcttatcgcgcagatattcggcaaagaaggtaaagccgccggaggcgatggccaccttccagcccagcgtttccagcttcagcaccagttgggtcagccccggcatcagcggcagcgcttcccgcacctgcagcagaatgttcgcgtcggcgtctttcagagtggcgacgcgctggcgcaggctggcggtgaagtcgagctcgccgcgcatcgcgcgctcggtcacttccgagaccagctcgccggtgccggcaagcttagcgatttcatcgatacattcgatctgaatcgccgtggagtccatatccatcaccaacaggcccggcgtgcgcagatgcgggattttgcccagcggcgcgacgtccagcccggcttcatgggccaggcgcgtggcgcgctgtgtcagcgaacccgccaggcgaatcacctggtaatcctccacgacccaagaagagacgatgaccaacgccgcgccgagctcgcgctgccacgccgtcagccgacgtttatcgagaccgcgaccatacagcagccagccgctgcgcccggcgtgataatccagcggcatgacctcgtcgccgctcagggaaagcggcaacccaggccacaaggaaacatcttcgggcaggtcgcaccaggtcaaactgttaggcattacggctccacatctcttcattcaggccaggaaaataacgcatgaggctaccttgtaaccagcgcttctggcaacattaagctgcaaattttcaaaggtggaatatggtacgagcaaaactgaaattccgactgcatcgcgccgtcattgttctgatctgtctcgcgcttctcgtcgcgctgatgcaaggcgcctcatggttcagtcagaatagccaaaagcagcgtaatccgcagttggaagagctggcgcggacgctggcgcagcaggttacgctgaacctggcgccgctcatgcgtagcgaaacgcccgacgaaaagcgcattacccgcctgctggaacagctgacggataaaagccgggtgctcgatgccggggtatatgatgaacagggcgatttggtggcccgctccggcgaaagcgtcgatgtgcgcgaccgcctggcgctggatggcaaaaaagccggcggctactttaaccagcaaatcgtcgaaccgatcctcggtaaaaatggcccggtcggctatctgcgcctgacgttggatacccacacgttggccaccgaggcgaaacaggtagataataccaccaatatcttacgcctgatgctgctgttgtcgctggccatcggcgtggtgctgacccgcacgttgctgcagggcaaacgtacccgctggcagcaatcgccctacttgcttaccgcgaataagcccgtccaggacgaagataaagattaaccagacaaggatatcctatgccgtcgctccgcctgttgctctccgactcctacgacccttggtttaacctcgcggtcgaggagtgtattttccgccagatgccagccacccagcgggtgctgtttctgtggcgcaacgccgacaccgtggttattggtcgcgcgcagaacccgtggaaggagtgcaatacccggcgtatggaagaggaccacgtccggctggcccgtcgcagcagcggcggcggcgcggtattccacgacctcggcaacacctgctttacctttatggcgggcaaaccggagtacgacaaaaccgtttccaccgctatcgtgttggcggcgttgaattcactcggcgtaaccgccgaggcttccgggcgcaacgatctggtcgtgaaaaccgacaatggcgaccgcaaggtttccggatccgcctatcgcgaaacgatggaccgcggttttcatcatggcaccctgctgctaaacgccgacctaagccgtctcgccaactacctcaacccggacaagaaaaagctacaggccaaaggcattacctcggtacgcgggcgcgtggcgaacctggttgagctgctgccgggcatcacccatcagcaaatttgcgaggccattcaggaggcattcttcagccattacggcgagcgggtagaggcggaagtcatttcaccggacaacacgccggatctgccgaattttgccgagaccttcgctcgccagagcagttgggagtggaacttcggccaggcgcccgctttctcccacctgttggatgagcgctttcgctggggcggcgtcgagctgcattttgacgtcgagaagggccatatcacccgcgcccaggcttttaccgatagcctgaacccggcgccgctggaggcgctggcggcacgcttagtgggttgtcagtatcgggcggaagttctgcagcagcagtgtgaggcgttgattagagattaccctgagcaggaagcggaactgaaagaactgtcggcgtggctggctggcgcggtgcgctgataaaaaagcccgctgcgcttagcgggcctgggaaaccgtaggccgggtcaggcgaagccgccacccggcacaacaggtcttactctttatcgcccagcagtacggattccagcgcgattttgatcatatcgttgaaggtggtctgacgctcagcggcagtggtctgctcgtgggtgcggatatgatcggaaacggtgcagatggtcagcgctttcgcgccgaactccgccgctacgccataaatgccggccgcttccatttccacgcccagaatgccgtatttttccatcacgtcgaacatggacgggtccggcgtatagaacaggtcagcggagaagatgttgccaacgcgcgcgtcaacgcccagcgctttcgccgcgtctaccgcgttacgcaccatgccaaaatcggcaatcgccgcgaaatcgtggtctttgaaacgcagacggttgactttagagtcggtgcacgcgcccatgccgataaccacatcacgcagtttgacatcttcacgcaccgcgccgcaggagccgacgcggatgatttttttcacaccgaaatcggtgatcagctctttggtgtagatagagcaggatgggatccccataccgtggcccatcacggagattttgcggcctttgtaggtaccggtgaagcccagcatgccgcgcacgttgttcacttcacgcacgtcttcgaggaaagtttctgcaatgtgcttcgcgcgcagcgggtcgcccggcatcaaaactacgtcagcgaaatcgcccatttctgcgttaatgtgtggggtagccatcgtttatccttatttcgttgttattgcctgatggcggctatgccttatcaggcctacaaaacgtattcaaataccctaaggatttcgcgttgtaggaaggcgacgaattcgtgaatcccgggagcatagattacctatgtgaccggggtgagcgaatgaagtcaacgcatctacagcgcgaaagacaacgggtattacagcatgtttttaccgtattccattggggaagtaccaaagtacgtcgccagcgtctggccgatatcggcgaaggtttcgcggtggcctagcgaacccggtttcactttcggaccatataccagcaccggaatgtgctcgcgggtgtggtcggtaccggtccaggtcgggtcgcagccgtggtcggcggtgaggatcagaatgtcgtcttccccaaccagctccatcagctccggcagacggcggtcgaacagctccagacccgctgcgtagcccgcgacgtcgcgacggtggccccaggaagagtcaaaatcgacgaagttagtgaagacgatagtctcgtcgcccgcttccttcatctctttgatggtcgcgtcgaacagcgcgtccagcccggtggctttcactttcttagtgatgccgcagttggcgtagatgtcggcgattttacccacggaaaccacatggccatttttctcgtcgaccagcttctgcagcacggtcggcgccggcggctcgaccgccagatcgtgacggttaccggtacgctggaagttaccagctttgtcgccaacaaacggacgcgcaatcacgcggccaatgttatagccgccttcggtcagctcttcacgggcgatttcgcacagctcatacagcttgtcgaggccgaaagtctcttcgtgacaggcgatctggaacaccgagtcagcagaggtatagaaaatcggtttcccggttttcatatgctcttcacccagttggtccagaatcacggtaccggaagagtggcaattgccgaggtagcccggcaggttcgcgcgcttaaccagtttatccagcagttcctgcgggaagctgttctcgtggtcgctgaagtagccccagtcaaacagcaccggcacgccggcgatttcccagtggccagacggcgtatctttaccggaagagagttcatgcgcccaggcgtaggcgccaacgacttcggcattaccgtccataccggcggcaatttttccggtagaaccttcatgcgctttcaccagcccagacgggtcaggttaggtaaattcaacgggcctttacgaccattgtcagcttcacctttggcgcaggcttccgcaatgtggcccagagtatcggcgccaacatcgccaaagcggtcagcgtcttccgttgcgccaatcccaaaggagtccagcaccataataaatgcacgtttcatcttgttctccatacatcatgcgctgcaaaaaagcgatcagatcagtatatcgctacttggtgattcggcgatagaccgtcggtgtaatttctggggcgtgagcgtccagtttaattgccgctttcacggctttggccgcttcctgccagctggattcatcttttgcatgaatcaccgccagcggacgttcgccatcaactttatcgccaaggcgcgccatatcggtaaagccaacgctgtagtcaatagtatcggaagcctggcgacggccgccgcccatcgacaccaccgccatccccagcgcgcgggtatccatttcagtgacaaatccggcgccttcagcatagacggctttgctcagcatcgccgtcggcaggtatttcgcatagttttcgacaaagtcgctcggcccttctgcgccgccaccatgcggccaaagacttccgccgctttaccgttatccagcaccgcctgcaatttcgcgcgcgcttcggcgtcatccgccgccagcttgccggaaatcagcatttccacgcacagcgccatcgtgacgtcgtacagacgcgggttacgatattcgccggtcaggaactgtaccgcttcactaacttcaacggcgttacccgcactggaggccagcacctggttcatatccgttaacagtgcggtagtgcgtacgccggcgccgttggagacgccaacaatcgcttcggcaagcgcttctgaaagctcataagtcggcataaaggcaccgctgccgactttaacgtccatcaccagcgcgtccagaccttccgccagtttcttggccagaatagacgcggtaatcagcgggatggaatccaccgtcgcggtaatatcgcgggtggcatagaaacgtttgtcagccggcgcgagcgagctggtctgcccgataatcgccacgccgacatctttaataatttcgcggaaacgcgcgtcgtccgggaaaatatcgaagcccgggatcgcttccagtttatcaagcgtaccgccggtatggccgagaccgcgcccggagatcatcggtacgtaaccgccgcaggcggcaaccattggcccgagcatcagcgaggtgacgtcacccacgccgccggtcgagtgtttatcgacgatcgggccgttgaggttaaggcttttccagtcgagaacggttcctgaatcccgcatcgccatggtcagcgagacacgttccggcatagacatatcatggaagaagatggtcatcgccagcgcggcgatctgtccttcagagatagtattgtcgcggatgccgttgatgaaaaagcgaatttcttcatcgcttaatgcatgaccatcacgttttttacgaataatttcttgtgcgagaaacacggtaacctcccaaatagtattcattgccggacggcggcgcgagcgccttatccggcctacaggcatccattcgtaggccggataagcgcagcaccatccggcgtatcaagggattagtagctgctggcgctcttaccgtcgccgtgacccagggctttcagcaggctagccaacaggctggatgcgccgaaacggtagtgacgggaatcggcccagtcggcgccaaacagttcatcagcaatcgccaggaactgctgtgcatcttccgcgctgcgcacgccgccggcaggtttgaagccaacggtcttctcaacgcccatatcgcggatcacttccatcatgatgcgtgcgctttccggcgtcgcattcaccggcactttaccggtagaagttttgatgaaatccgcgcccgctttaatagagatttcagacgccttacgaatcagcgcttcttctttcagttcgccggtttcgatgatcactttcagcagcacattcgccgccgcacaggcttctttacaggctttcaccagctcaaaacccacctgctcgttaccagcgatcagcgcgcggtacgggaaaaccacatccacttcatccgcgccataagcaattgccgcgcgcgtttccgccagcgcgatatcgatatcgtcattaccgtgcgggaagttagtcaccgtcgcgatgcggatatccggcgttccttgttcgttcagcgtcttacgggcaatcgggataaaacgcgggtagatgcagaccgcagcggtattgcccaccggcgttttcgcctgatgacacagggcgatcaccttctcattggtgtcatcatcattcagggtggtcagatccatcagtttcaacgcgcgcaggctgcttgctttcaaatcagtcatttcatactccgacggcgtattgccggttcaatagtttgttcaccttgcgagtctgttactattgtaacaaccactcgccattacacttcgacattcatcacagttaatgaaaactaattactaatttgcattactgtaacgtgacaaaaatcacaattaaccagcaattaccgccagcctcaccgtcatctcctgtttaagcataatcggcaaaccgaggttcatggttatgttattattctaacatatcaaaacgagttatctcgacgtcatggcgcacaaattgtgcaaatcctggccataaatatactttctgattgaaacttaatggattttatatttataaaaaatgatgggattgtcacacccagccagaaccggggacgactttgtccagtatgtgggtcgttagagggttagcgcggtaaagaggtttttggtattcgccagtagtgccgcttcaatttcttgcgccggttccgcgcgcagttcacatagcgagtcaaagacgcgggccgcctgttccgggcggttcggctgtccctgaaaaccattcagcggcatatccggagcatcggtttccagcagcagcgaagaaagcggcagacgcgccatgacatcgcgagttttgctggcgcgaggataggtaatggtgccgccaacgccaatcttatagcccagttgtacaaaacgttccgcctgctgcaggctgccggcaaaaccatgtaccacaccggcgcgcggcaggttatgtttttttagcaacatcgccagcttatcgtgggtgcgccgcgaatgcaggatcaccggcaaatcgtaacgcttcgccagccgcagctgcgcttccagcagcgcctgctggcgatcgaattgcggatcgtcgcggtagagatcgaggccaatctccccgactgccacgagtttcggatgacgctgtgcaagatagctttccagttgcgttaacccgcggtcatcatgctgttcgataacaatgggatgcatccctaacgcggcatacagcggctcgtgttgctccgccagtgccagcacgcgagcaaagcgcgcggcggatatcgacggcacgataatacgtcccacgcctgcctgcgccgcccgcgcgatactcgcagtttcattatcttcaaacggggggaaatcgaaatggcagtgggtatcaataaagcgtaacgtcacgccagatcctcgtgattaaagttagggtcattggcctgtggcgcggtgataatcgcctgttgcggcgtttcgttagccaccggcagcggcggcaccaccaccggcgtcggcattgccacacgcggcgcatgacgtaacagcggcggttgctcggtcagcagtttccctaccgtggcgaggaagtagcggccgcactggcgtccggttttataatcttccagcagcgccggcagacggctaccaagcgccatactgcgcagcggccgctgcggatagatttcgaatatccgcagtttacccggcggtttttcaataaactgctgcgtcgcgcgataggtggtttcgtggtgctggaccaggttcacaaaaggctgcaaactgctttcccccagccagcgttccattcgtttaaaccactgcggggtgtagaacatctgcgaagggacggtacggatcaccacaatagtctgcgcgccgcggcgcgctgcctcctgcacagggatcgcgtcgctgacgccgccatcgaggtagttcacgccatccagcaggacaccgctacggtaaaagcctggaatggcgctggaggcgcggatcagatcaagccaggtctggcgggtgggggaaaaatagtttgccgtgtagtcgtcaccgcggcaagcgcacatccacagctctttacccagcgcgaactgctcctcggcatagtccatcgccagcggcatttgttgtgcagtggaatcgaccagccaatcgagatcgataagattgccgccgcgtacgaagcgcatcgggtcaaaaaattgccgcgaggtggtgtaacgcgtaatgactttacgggcgtagccctgctgattacagatataagcggagatgttttgcgcgccagcggaagtaccgagcatcaggtcgaaagggttaaatccagcgcgcatgaattcgtccagaaccccggctgtgaaaatacctctctgaccaccgccttcgcacaccagagccaatttgcctggacggaagggttttaccgctaacggggcgatattgcccaacgtcacgggaatgcgctgccccaccctgctttcctgtttgtctattttctgtcattaaagtaacgcaaattgtcgtcccctgaaaccgcaaaagccagtcacattgactggctttatgtaagacgttatgtcatcactgcgcgtttattgattcacgcctttcggcatatcgcctctagggtcgttttcgcccggtaaacaggctgaccaggaaaatgataataccgacaacaaagacgattttagccgcccacgccgcggtacccgccagaccaccaaagcccaatgcggcggcaatcaacgcgatgatcagaaaaataatgccccatctaaacatactgttctccttaccatatgattaacggtcgcttttctgcgcgctcaggccgcgcatacatcaaccctgcgtacaactcgctcagcggtatcgccgctggcgaatatcttttaataaatacccttactgcactttaagatcgttcttcacgctcttaacaccggttaccgctttggcaatgtctgccgcgcgatcgacctgcttgctcgattccagggttccggagaggtgtactaccccgttgctggtttctaccgtcaccttacgcgacggaacgatatcgtccgcgagcagtttggctttgacttcgctggtgattgcggtgtctccggcataacccttcaggctcgccgatttttcacccgccacggtcagcttatcgcttaccgaactcaccccttcgacgcctttcgccgcgctgacggcctgtgatttttgctcagcgctctctaccgttccgcttaaggtcaccactttgttttccgttttcaccgagatatcggtgctacggatacttttgtcatcgatcagcgccgctttgactcgggcggtgatcgtgctgtcatccataaaatcgccaaccttgttgatcgatttgtcgacgctttctcctgcgctggtcgcggcagccttcgcgctatcggttgcggtggtttccgcataggtcgaggcgcttatcaacgctgagcctaagaagagaggcagcaatagcctggcgctctttagtctggtcattggtatgccctcacgatgtctgctttggtaaaacaaatggctatttattcagccaggtttctgaaaagtgcttaataaatatagtagatgagcggagatgcggcggagggtttgaataaaaaagctacgattcgcgcagatttaagaactttctatggtaaggagggagacgggtaaaacaggctggagcgcagcgtcgccgcgctccagagagatattagtgttcgcgggttttgcggaacaccacgtcagggtaacgctcttgcgtcaggttcaggttcaccatcgtcggggcgatataggtgagattatcaccgccatccagcgccagctgaacttcgttcttacgcttaaactcttcgaatttcttcacgtctgtcgattcaacccaacgcgcggtggccacgttgacagattcgtaaatcgcttcaacgttgtattcgcttttaagacgcgctaccaccacgtcaaactgcagcacgccgacggcgccaacaataagatcgttattggcaataggacggaagacctgtaccgcgccctcttcagacagctgtaccagccctttcagcagctgtttctgcttcagcggatctttcaggcgaatacgacggaacagttccggcgcgaagttcggaataccggtgaacttcatcatttcaccctgggtaaaggtgtcgccaatctgaatggtgccgtggttatgcagaccgataatatcgccagggtaggcttcttcaacgtgcgaacgatcgcccgccataaaggtcagcgcgtcggaaatcaccacgtccttgccgatacgcacctgacgcagcttcatgcctttctcgtatttgccggaaaccacgcgcataaaggccacgcgatcgcggtgtttcgggtccatgttggcctgaatcttaaacacgaagccggtgaatttctcttctgcagccgtcacttcacgggtatcagtgttacgcggcatcggcgccggcgcccactccaccaggccatccagcatatgatccacgccgaagttgcctaatgcggtcccgaagaacaccggcgtgatttcgcccgccaggaacagatctttatcgaactcgttcgatgcgccctgcaccagttccagttcatcgcgcagctgctgcgccagatcctcgcccaccgcagcatcgagttcagggttattcaaccccttaacaacgcgcacttcctgaatggtgtgccctttaccggtctgatagaggtaagtttcatctttataaagatgataaaccctttaaacagcttgccgcagccgataggccaggtaatcggcgcgcagccgattttcagctcattttcgacttcatccagcaattccatcggatcgcggatatcacggtcgagtttgttcataaaggtgaggatcggcgtatcgcgcagacgggtaacttccatcagcttgcgggtacgatcttcgacacctttcgccgcatcgataaccatcagacagcagtcaaccgccgtcagggtacggtaggtatcttcggagaagtcttcgtgccccggggtatccagcaggttaaccaggctgtcatggtacgggaactgcatcaccgaggtggtaatcgagatcccacgctgcttttccatttccatccagtcagatttagcatgctggctggaacctcggcccttcacggtaccggcggtctgaatcgcctgtccgaacagcagcactttttcagtgatggtggtcttaccggcatccgggtgagaaataatggcaaaagtgcggcgtttagccacctcttgcagataaggagacaacgtcataattcaatcttctaagtaaacgcggcaatgggccgcgcatgtggaatacgaaaaattgcggctattttacccatcaatggggggaggcaattagtgtttacacaggagttgctccagttcgcttaaagaggtcaccgtccagtcgggctggaggtctgccggcagcgtttgctggtgcgcattcagccaacaggtggcgagcccggcattgacgccgccgcgaatatccgactcggcggtatcgccaaccatcaatactctgtcgcgcgacggattacccgcttgcgccagcgcatagtcgaagatacgcgcatccggtttcgcgacgccgacttcctcagaaataatcaacaaatcaaagtgatcgcgcaggcctgtacgttccagacgagtctgctgcaacgaggtaaaaccgttagtgatgatgcccatttttaccttgccctgcagcgcattcagcagcgatacggcgcccggcagcggcgcgcagatttctgccatcgcattcatgaaagcatcgttcagttcgcccggtgggacattcaaacgttccgcccagctatcaaaacgctgatgctgtaattgtagcgaagtgatggcgccgttttgataatccacccacagcggcttattaacggcctgatagtcctgaaaatcttcggcggtaaaggtcacgctatagtcgagaaacatccgctgtaaaccgctgaaagagtcaaacgtaaacaacgtttcatcggcatcaaagaaaatccagtcccatttcatcgtttcaccttgtcttacatactgattggcagagccatgataattgcgtcttcacgcccgtcagccgtagggtagtaattgcggcggatagtcgcctcgttaaagcctaagctttcgtagagcgcgatggcggcgacattcgatgcccgcacctccagccacagcgtgacgacgccgagtttttcaacttcatcaataacatgttccagcagttcccgtcccagaccgcggcgctggtatgcggggtcgacggcgatgttaaaaagcgtcgcttcatcaaggacaatctgagtaatggcaaaggccgccatttctccatcaactgccagttggtaattcagataacgttcaccctgattgctggcaaaggtttgttcgctccacggaaaagcgtgggcgcgtttttcgatttgccaggctttggataaatcagccgtgctgagggtagaaatcgtgttcatgtgcgcagatttgttgccagagcgcgatgcgagccggcgcactgctctgaagttcatcaaaaacgggcgtcgagacctgggcgcccgccagcgacagcggcgtctcgcagcccagccgccagctgttgcagcggctattttgcggcagcatcgctacccggtccggcgtaagctgcagtacctgatcggcgctaatcgagagcgcgcgtagaatatcgctaatgagcggttcagtcagcgacggcggggtttccgccaccatcaccagacgaatatgttcaggaagcgagatagcgatttcgccctgcaacgccccgggcgacgcagcgaccactgggtaattcccagttgctgtaattgccagtctcgtcgggaagtcatagcgaaacactcctgttaaacaagcgcgcaatatagcaaatccgtcgtatctgcgccaacaaactactataatcggcgccagtcttattgaaggagtgtttcatgtcagcttttaccccggcaagtgaagtcttgctgcgccacagtgatgatttcgagtccgcccgcgttctgtttgccggtgacctgcaggatgacctgcctgcacgtctggataccgcggccagccgcgctcacacccaacaattccaccactggcaggtcctgaatcgccagatgggcgacaatgttcgttttagcttagtggccgaggccgccgacgttgccgattgcgataccctgatctactactggccgaagaacaagccagaagcgcagttccaactgatgaacctgctctctctgctgccggtagggatcgatattttcgtgatcggcgaaaaccgcagcggcgtacgtagcgccgagcaaatgctcgccgaatacgcaccgctaaataaagtggatagcgcccgccgctgcggtctctaccacggccgtctggaaaaacagccctccttcaacgccgaacagtactggaacgagtacgcgctcgataacctgaccattaaaacattgccgggcgtgttcagccgcgacggcctcgatgttggcagccaactgctgctgtcgaccctgcaaccgcacaccaaaggtaaagtgctcgatgtcggctgcggcgcaggggtgcttgccacggtactggccagccattcaccgaaggtacgcctgacgctctgcgacgtcagcgctccggcggtcgaagccagccgcgcgacgcttgccgcgaatggttttgaaggcgaggtctttgccagtaacgtcttctctgaggtcaacggccgttttgacatgatcatctcaaatccgccattccacgacggcctgcagaccagtcttgaagcggcgcaggcgctgatccgcggcgcggtccgccatctgaacagcggcggcgaactgcgtatcgttgccaatgccttcctgccgtatccgcaggtgctggatgagacgtttggcttccacgaagtgatcgcccaaaccggccgtttcaaagtttaccgcacggtgatgactcgccaggccaagaaataatcttcctttcccataggcggtatgctcggcatgccgccggtacttcccttcgctctgaatagcccatttttgcagcaatcgataaaacctgcataattaactattgacgtgtcgccgaaaaacactagaatgcgcctccgtggtaacgatacttttctagtgtcgatggtatgcgaaggtggcggaattggtagacgcgctagcttcaggtgttagtgtccttacggacgtgggggttcaagtccccccctcgcaccataatccacgttgatatcgctcgcactgtgcgaaggtggcggaattggtagacgcgctagcttcaggtgttagtgttcttacggacgtgggggttcaagtccccccctcgcaccaacgaggcgatatcagattaagaatactgtgcgaaggtggcggaattggtagacgcgctagcttcaggtgttagtgtccttacggacgtgggggttcaagtccccccctcgcaccaatattcttacccttctctgttttatcccatcagcttcaaattcaacattatcagcattatcccaccgatcagcgctacgcttgacggcaacagtacgaaatgacgtaactgacggtgccagatcatcgccgccgatagtagtaatcccagagcaatcatcacgcgccaggcttcgaccggcaggccaatcatgcctaacgccatcaccagtacgcccggcagcagaattccccaaccactccctaaagctcgctgcaacatggttttgcctctcacaacgataatgataaccaatatcatatgataatttttatcatttgtcatgccaggacgtttaacttttattactcttgcactcaggagtaatgacatacattcattgggatgataaattaagcaaaataaatctatatattaaattgtctgatcatttgcgcagatagccttatattacgtgttgttttatatttttcccctttggcagccatcatcttgaaacttaactactaataatgatagtaccaatatgactgcacaaacctggcgggctcattatgagcaaaaatatcagtattccttacgactttttttattacttaattgtgtttctgccgctctatcgctactcagtccgctgtttaccattgtcaccgtcacgctgccgtgtgcgctgatctgtgcggccagcctgagcttcttgttatggaattggaaatttccaaaacaaaaaataaatattcctgttatttctctgttatttggcgtgctatgggcctggcacatcgtaataaaagcctcattgttacccccgccgcattttaactttctggttattgccttattaagcattctgtttattggaactatcgctttttctaacaatatcattgcctttactctacattccctaccgacttttattatgtgtctggtgttggatggcggcgaacaatggatgcggatgttttactgcttcgccctgccggttgccgggattacgttgcagaacatgatgcaaaagcgcagcgataattttacccaagggctaatggataaactgctgcaagaacgtaacaccctgaacgatctcagtatgcttgatccattgaccggcctgtataaccgtcgtggcctgcaaaaccagctggataacatcctgacagtggatacccgcgaacacttcatcctgctgttggatattgatcacttcaaagcctacaacgataactatggtcatatgatgggcgaccaggccctaatccaggtatcggcggccattcgtaattccgtacgttcacgcgatatcgtcgctcgctttggcggtgaagagtttatggtggtgctgaccagcagcccggcggaatccgccttccagacagcagagcgtattcgccaacgggtttacgatttaaaaatcgcgcaccgttttaacgagagcgtcgccaccaatgtcactatcagtatcggtatgaccccgctggtgaatggcgatatcaacagtgcgataaaacgcgccgatagcgcgctatatgaagccaaaaaccaggggcgtaatatcattctcgtcaactaatacttccagcccaccgcgagggatatgcggcgctgacaaatcgcttgcgctccctgcagcgaacaactagtatcagcaatcattatcatttagatttgtatctggaaatctgatgacttaccgtaccttcccattcagcgatgaaatcatctggcgtgcgccgcttgcgcccgccgagcatgcattggcgaatgcggtacgggaaaagatcgcagcggtacgcccgcatctgctggattttctgcgcctggatgaagaagcgccgccgcttgccctaaccctcacggaatggtcgcaaccgaccaccctcatttcgttattggccacctatggcgatcacatttatcgccatcagcccagccagccgcgtgaacaaaaacccctgctttcactgtgggcgcagtggtatatcggcctgctggtgccgccgctgatgctggcgttgctaactgaagaacaggctattagccttgaaccggagcattttcgcgtagagttccatgaaagcgggcgcgcggattgcttctggattgatgtgcatgccgaccatgatgcgttgacgctttccgcgcaagcgcgtatggatatgttggtcaataaagccctgaaaccggtggtggaagcgctggaagctaccggcgacattaacggtaagcttatctggagcaataccggctatctgattaactggtatctcggtgaaatgaaaaatctgcttggcgacgagcaggtgaacgcgttacgtcaacactgtttttttgcaaaacagcagaccagtggcgaggataacccgctgtggcgaacggtggtcttgcgcgaagggctactggtacgccgaacttgctgtcagcgttatcgcctgccggacgttcagcaatgcggcgactgcacgttaaagtaatcacctgacgggcggcaatatgccgcccgttgttattttatgcggtctgctcgttctcctgcgccgcgcgctgcgcctcttcggcttcctgcgccagcagttgcttttcgtacactttaaagaacgggaagtagatgattgccgatacgcaagcgaggataacgaccaggagcgccgcgcggaaatcccaccccagcgcccacgcaccgccaattggcgccggagccgtccacggcacgacggatattacccggctaatcagatcaagcttcattgccgcccaggcaatcaccgcattaaccatcggcgccagcaggaacggaataaagaatacggggttcatcacgataggtgtgccaaagataaccggttcgttaatgttaaacaggcttggcaccacgcttaaacggccaatagagcgcaaatgcgcggaacgactgcgcagataacagaacaccagccccatcgtggcgcctgaaccgccgacaacgatgaagaacgtccagaatgcttccataaaaatatgcggcagcggcgcgccctgcgccagcgcatgctggttcattcccaggttagtgagccagaacatctgcagcatgccggagacaatcgccgcgccgtgaatacccgcaaaccacagcaggtgaccaatcaatactgccagcagaatggccggtaatgaatccgcggcggataccagcggcttgaagatagccataatggcctgcgggatcagcatatcgaaatgatgctggataaacagactcagcggatagagcgtcagtaccactaccaggaccgggatcagcagatcgaaagagtttttaatcatcggcggcacttgatccggcagacgaatcccgatgttgtgcgccttcaggaatcgcatcatctccacgcagtaaatcgccaccaggatggcagtgaatatcccggtaccgcccagactatcaaccggcagactgccattggtttttggcgctgcgatcagcagaaaggccatgatcgacagcatggcacacatgaaaggatcgagctggtatgctttttcataatgcttgcccaggttgtaggaaatcgccgcgcagatatagatcgacataatgcccatggtcatatcaaaaggcgtcaggatccgtccttcgaactctttggccagatccagccaggcgcgggcgaagccccaggtggtatccggtgaaaacggaggataggcgaagactaagagaaatgaacccacgatcataaacggcatggccgagatgaaaccatcacgaatagccataacgtggcgctgcgatgaaatgcgcccggcaacgggacttatataattctctacaaagcgaaatatcagattaaacgcagcatggttagcagacatagcagccctcctgacaggctatcgaaacaggcccaacaacggtaatcttgccgctatgctgaaattaactacgtatcgacagtggctaatcggaattaaaggtcgccatattgtcagcagaaatatctcacgcgcggctgttagttatctttgctacagggagttaccttgtcagtattcatcgacgaacgccatactgcaaccggttacagtaaccggttgcggtgattgtgaagaagatccagaaatcagaataattcctgattatctatcgacaatatttacagatttccggccttgtgacagatttaagcggataactatcaggagaaccccatgagtctgcagtccgtgaggcagttttttgctgaacatgcccccgatattgaaatcatcgaattgaatcaaagtacggcgaccgttgcgcttgccgccgccgcgcatcgggtcgaaccggggcaaatcgctaagactttatctttaaaagtaaaagaccaggttatattgatcgtcgccaaaggtgatgcccggcttgataataaaaaactgaaagacgctttcggggcgaaagcgcgcatgcttagtagtgatgaagttgttacgctgactggccatcccgtcggcggcgtctgcccgtttggcctggaaaatccactgccggtttattgtgatgtctcgctcaagcagtattccgaagttctgccggcagcgggggcaattcatagcgcggtacgaatttcgcctgaacgtatggcgcaactgacagaagccgactgggtcgacgtctgcctgtagattgccaattattgcgccagacgcattccccggccgtcatcattattagccggcagacacagcagaatgtctgccgcgctgagcaagccaatgtcagagttcacacccagtttggtcattgcattaaatttatgcgcgcgaatggttttgatatttctatcaagccgggtggctatttcgggcagtgaatagccgtaagtcatgtaacgcaggatcgtatgctcggttgggctaagaatttgcccgcaggagctatagctgcgattgagaatactttctttgtccagcggcgcctgttcaattagctgcagtaaacgttcttgcaggcgagtaagacaagatgatttattgaggatagtttgcgggcttgatggcgtcagatggctgatcagacgcatttccgccgtattatccgccagtacgattcgctgtatttcgggatgagtttgcgcaatctcgtgtaagaagagcaggctttccagacgaatacgcctgctaccggaaagagaaaaaataacggcaataaagtttttggaagcgaattcgcgctttagagcctgagtatctttataaaaatgaatgctatatattttacccgcatcgttacttaaaatgtaacgaagcgccgtctcagtcattgcgcatttttctacgatagcgacacatcgtgttgtgagatttttttccattccgtgttatctccataggctgaatacagattcagttccttcattccttgagcgctattgatccaggcatacatttctgcattactgcgtaacgaaagtcggcgcatggcgctatttttctgcgcgcttatcgttttattgctctttttcaacaaggcagcaatctggttaattccccacccttttgccagaagccgcaaaactttgcgttctgaaaaagttaagatgaccgtctcgccagcgtcatcacctaagttatccatctcgggtgaaaaaagtgtctggctaattctctcagcagaaagtttgccggcgcggatgacttcaatgaaacgtttgaccggctcgctatcagaaatcaacgaactttccggccgcatcagaaactcaaccgccagagggaagcaggcgtgaccaaccataaaaatccaatgaatatcccggtattgattcattagcgaataataatgttcacaaatgtcccggggcattcaatgtggccggagagatcaacgaggaccagtacggcacggcgaagctgcagtaatgtgagttcatcctgcgaaccacagaaacttagttcgtaatcaggaagatgttcccttaaaatagccttcaagccggattgcataaccggtattctactaataatgacgccaaatttaccttgtcctggcaacataaaacctccgcatcctgtcaaagattcacacccgaaataaatgacggatgaatggctactataatattatttcacctactgaatctttatcgtccctgttgggcataatgcatgccctgaagttaattccataagcgagagagatatatcactattactctcatcaacgatttaccctaacacaaaacgatgccatcaataaattagaaaaaattaaagccctcattagaaaaattaccttaagaattaaataaataacttatttaatttctttcctaaatgcttttggcgagattccgctataccgccgaaagaatcttgaaaaataagcggcatcagtaaatcctaaataatcagaaagttgtgtgattgtcatactggtatattgcaggttacgccgtgcttctaacattaagcgttgatgtaatacgcctaaggcgctacaaccatgaaattcacgacacaaataatttaaatgcgttgtggaaagccctactagctttgcatattcagccagcggcagatgctcccggtaatggctttcaatcaggcgggaaaaatggcgcatgacgctgcgcttacgttcggctttgtcttctgtcaccgatgtcggctgacactggcggtttaaccagaccaggagcgctcccagcagcgaatgtagcatcatctcgcgcgcatcgtgctcttcgcagtactcttcacgcaaggcggtaaacagcgagcggatatggccacgcgagcgttttaccgctacgcactgcggctgtgatagcacatcaagcgttcgaccaaactggctttcgaagcggctcagcagcggctgcgaaagcgacaggacaaacccctgagtaccgggtgaaaaacgaaagccatgaatgcataatgccggcacaacctgaatacaggcttcggtcatgaccctcttcacgccctcaatttcaatttcagctcgccctttatgcagatataaaagctgcaccatttcagcatgttgatgtacgcggatatgccactcataaaggctgctgcgctgcaaaatggattcgcaatgcagcagatccggcgtcggccaaccgcgctcttcgccatacaatttaaaaacagggatcgtgctcgcggtcgacatggcatctccagttttcgttagccgttacgttacctgctccatcggcagacccacataattttcggcgatcgtcgtcagcccggctcgagaccccagatagtagcggcggtcagcggcctgcatttttttatcgaaatcagtttgttcagggaagtcatgcagcaggcgagtcataaaccagctgaatctctcccctttccatacgcggtcgagagccaagcgcgaataactggcaatcagatccgcgcggccatggtgataatactcacgcaggatccgccataaataattgacatccgacgccgccagattaagccccttcgcgccggttggcggcacgatatgcgcggcatcgccgaccagaaacagcctgccgtactgcatcggctcgacgacatagctacgcagcggcgcaatgcttttctcaagtgagtgaccagtcactaacttacttgccagatcctgcggcagacgccgctttaactcattccagaagcgttcgtctgtccacgccgagacgttatcgcttagaggcacctgcagataatagcgactgcgtgtgagtgagcgctgactacacaatacaaatccgcgttcgtgatgggcgtaaatcagctctggattcaccggtggcgtatccgccagcaaacctaaccaaccaaacggccacacgctttcatattctttgagaatgtcacgtggaatgctttgccgcgaaacaccgtggaaaccatcgcaacctgcaataaaatcacactccagacgacacttttcgccgccgctcacataagagactaccggtcggtcgctcttaacatcctcgattgccacctcgctaacgccatagataatcggcgcgccgctgtcgcgtcttgccgccatcaggtcacgggtgacttcagtctgaccgtagaccatcacgcttttaccgccggtcaactcgctgagcggtaccggtacccgctggccttcaaataaaaactcaacgccatgatgaaccagcccctccgcatccattcgctttgccacccccgcttcgcgcagtagctcgacggtaccgttttcgagaatccccgcccgtatacgtcccagcacatattccgcactctgacgctcaaggatgacggtatgaataccagcgttatgcagcagttggcctaacagtaaccctgaagggcccgcgccaataatggcaacctgtgttttcatagagtactcaccctcggaagttaattatttgtttgttttttgtttatgaaaagttcctggatgcatttttgataacccaaacgggaaaaagaagggatgaatggcggtaaaaattgcactttccaacgaagtgacgaaagtgtggcgcggttcaaatttcagccacccccattaatggggtaatttttgcacattgtttgatcctgcacgccgtacaggggggtggagttcaggtaaaagtatcaatagagacgcggacagcaggtacttatgcaggcagataaatcagagcagcgcgccgtcacccggttgtgcatccagtgtgccctttacttactccagcacggtgcggaaagcgcgctggttgaagagctttctacccgcctcgggcgggcgttaggcatggatagagttgaaagcgctatctcctctaacgcgattgtgctcaccacgattaaagatggcgaatgcctgacctccacacggaaaaacagcgatcgcggaattaacatgcacgtggtgacggaggtacagcatatcgtgatcatggccgaacataagctgctggattacaaagacgtcgcgaagcgcttctcgcagatcaaacccttacgctacccgcgttggctactggtgttgatggttggcctctcctgcgcctgcttttgtaaattgaacaacggcggttgggatggcgcggtggttaccttctttgccagtaccgtcgccatgtatattcgccagttgctgacccaccgttccatgcatccgcagattaatttctgcattactgccttcgtcgccaccaccatttccgggctgatgctgcgtctgccggcgtttagtgagacgccgactatcgccatggccgccagcgtgctgttgctggttcccggctttccgttaattaacgccgtggccgatatgttcaagggccatatcaataccgggctggctcgctgggcgatcgccagcctgctgacgctggcgacctgtatcggggtggtaatggcaatgaccatgtgggggctacgcggatgggcataatctcttatcttttcgccctggcgcaggatatggcactggcggccatccctgctgtcggctttgcgatggtgttcaacgtcccacagcgcgcgctgcgctggtgcgcgttactgggcgctatcggccacggctcgcggatggtgatgatgagcgcaggtttcaatatagaatgggccacctttctcgccgcgttactggtcggtagtatcggcattcagtggtcgcgctggtatctggcgcacccgaagatatttaccgtcgccgcggtgatcccgatgttccctgggatttcggcttatacggcgatgatctcggccgtcaaaatcagccattttggttactccgaagagatgatgattatgttgctgagcaactttttaaaagcctcctctatcgtcggggcgctctctatcgggctgtctattcccggtctgtggctctatcgcaaacgcccgcgcgtgtaaccggcagcgctgcttcctggcctcgcactatgctactatgtcagcaattcccccactctttgctgttcagagttgagatagcgttatgtcttcacgaattttaaccaccgacttttgcggtcttgacgatttcgtcgagaaccacgcggccaggctgcaaaaatcagccagcggcgccgtcgccgtatttgccaataacgccccggcgttttacgcgctgacgccggagcgcctggcgcagctgctggagctggaagctaaactggcgcgccccaccagcgatatcgcgctggatgcgcagttctttgacgagccgagcgccacgcccgtcgccgtgccgatgggaaaattcgccatgtatgccggctggcagccggatgccgattttcagcgtctggcggcgctgtggggcatcgccctgacgcagccggttaccccggaagaactggctgccttcgtcgcctactggcaggcggaaggcaaagttttccaccacgtgcagtggcagcagaagctggcgcgtagcgtgcaaatcggccgcgccagcaacggcgggcagccgaagcgcgatgtgaacgctattagcgaacccgataaccagatcccgcgaggtttccgaggatgagcatgaaaaacgttggcgatctcatgaaacgcctgcaaaaaatgatgccagcccacgtgcaaccggcgtttaaaaccggcgaagagctgttggcctggcaaaaagagcaaggtaagctgcgttcggaagcgctggagcgggaaaatcgggcgatgaaaatgcagcgcacctttaatcgctccgggatccgtccattacatcagaactgttcatttgataattaccgggtcgagaacgacgggcaaatgatcgccctgtcacgcgcccgccagtacgttgaagagtttgacggcaatattgcgagctttatcttctccggcaagccaggcaccggtaaaaatcatcttgccgccgctatctgcaacgaattgctgctgcgcggtaaatcggtattaatcatcaccgtcgccgatattatgtcggcgatgaaagatacctttggtaatcgggaaaccagcgaagaacaattgctaagcgacctgagccgggtcgatctgctggttatcgacgaaatcggtatgcaaaccgaatcacgatacgagaaagtgattattaaccagattgtcgatcgtcgctcctcctcgaaacgcccaaccggcatgctgactaacagtaccatggatgaaatgaacaaactgctcggcgaacgcgttatggatcgcatgcgccttggtaacagcctgtgggtgaacttcacctgggatagctaccgcgatcgcgttaccggtaaagagtattgagagatttccgagcgcaagcggcgttatactgaagagattcttaagtaacgacgaagagtacgtttatgaaatctttgcagacagctttttgcgccgctatcgcagccggcgcgttgatggcggcccctacctacgccgcctcctggcaggactcactcaatagcgccgccagccagctcagcagcagttcccagcaaagcggcggcggtatgtcgatgtcgtccttaaccagcctgctcaatggcggcaaccaggcgctcacctccagcagcatgaacaatgccgccggcgttctctcttattgcgcgcaaaaaaaactgacctcggtcaccaacgccgacaacgttaaaaaccaggtactggataagcttggtctgagcacgccggagaaacagaaacaggataccggttatctggaagggctacagggattgctgagcagtaataacggccagcagttgaatctcaacaccctcggcagcagcccgctggctgaaaaagtgaagaccaaagcctgtgacctggtactgaaacagggcgttaacttcctgtcttaaatttccccgccgatgccgcgtttggcgctttagcgttgccagcgcggccgcaatcgctatttttacttttctgctcctgttttccgcgcgacgacaggatgagacatcgtacaaaaaagacgctttctaaaccaattctgaatcacagcacactttcatgacactacaattgcagcagaaaggcgctgccattacagtgtagcgtgaaaatcgatctatccggccagcccgccgctggcgcatacgagggttagctgtgtcagagttgttatccatcgccttgtttctcgcctcggtggtgatctatgcctggaaagccggtcgcaacacctggtggttctctgccaccctggcggtgttggggctgtttgttgtgcttaatatcaccctgtacgccagcgactacttcaccggcgacggtattaacgatgcggtactctatactctgaccaacagcctgaccggcgcgggcgtcagtaaatatattctgccgggtatcggtctggtgctggcgctggtcgccgtatttggcgctctcggctggatattacgccgtcgccgccatcatccgcatcattttggctacagcctgattgcgctggtactggcgctggcctccgtcgacgccagcccggcgttccgccaaatcaccgaactcgtgaaatcgcagtcccgcgatggcgatccggacttcgcggcctactacaaagagccgtcgaaaagcatcaacaatccgcagctgaatctggtctatatctacggcgagagtctggaacgcacctacttcaataacgaagctttcccggagctgacgccggaactgggtaaaatcaaaagcgaagggctggatttcagcaataccgcgcaacttcccggcaccgattacaccatcgccggcatggtcgcttcccagtgcggtattccgctgttcgcgccgttcgaaggcaacgcttccgcggcggtatccagcttctttccgcaaaatatctgtctcggcgatatcctgaaaaactccggttacgaaaactactttgtgcagggcgccaacctgcgttttgccggtaaagacgttttcctcaaatctcacggcttcgatcacctgtacggcgcggaagagctgaaaacaacggtggctgacccgtcctaccgcaacgactggggcttctacgacgacaccgtgctcgacgaaacgtggaaaaagttcgaagagctctcccaatccggcaaacgcttttcgctgttcgctctcaccgtcgatacccaccaccctgacggctttatctcacgcacctgcgagcgtaaacgctatgacatggatggcaaaaagaacctctccttcagcgccgtggcctgtagccaggagcacatcgccgcgctgattgaaaagattaaggcctcgccgtacttcaaaaacacggtgatcgtggtctcgtccgatcatctggcaatgaaaaacagcgcctgggattatctgaacaaacaggatcgcagtaatctgttctttatcctgcgcggcgaccagcctcaacaggatgtactggccgtgaagcgtaataccatggataacggcgcgacggtgttggatattctcggcggcgataactatatcggcctcggccgcagcagcctttccgcagagtcgctctccactatcttcatgaacatgaaagagaaagtgctggcatggaaaccagatgtcattcgtctgtggaatttcccgaaagagatcaagaatttcagcatcgactcgcagaagaacatgatcgcattctccggtagccacttccgtctgccgctgctgctgcgagtctctgatcagcgcgtcgaaccgattccggaaagcgaatattccgcgccgctacgcttccaactggcggatttcgccccgcgcgacaacttcgtatgggtcgaccgctgctacaagatgggccaactgtggcggccggaactggcgctgtccaccgactggtgcgtctcgcaaggacagcttggcggcgaacaacaggttcagcacgtcgacaagccgcaatggcagggcaaaaccgccttcaaagataccgtcatcgatatggagcgctacaaaggcaacgtcgatacgttgaaaattgtcgataacgaaattcgctacaaagccgatagctttgtgtttaatgtcgccggcgcgccggaagaggtcaaacagttcagcggcatctcgcggcctgagctgtggggacgctggtccaacgcccaactcggtgacgaggtgaagattgaatataaagaaccgctgccggaaaaattcgatctggtgatcaccgccaaagccttcggcccgaacgccaaccagccgataccggtgcgcgtagggaaaagcgagcaagtacttactttagccaatgaagtgaccacgacgacgctgcatttcgacaacccggcgcgcagcaacaccttaactatcactccgccggaaccgcagtccaccaacgaaggcaatattgtcggccacgcgccgcgccagttgggcattggcatggtggatattaaaatcgtcagtcgcgaaggttaacgcctgcggcccggcgtctgcgccgggctagttcaagcgcaggcacatctcgtactgctgcagcgccagcggcgcatagcccgccgatttaaacagcggcgtgaaggtttccgggatggtcaccgaagtgcttaatcccggaaactgttgagccagcgcgagcagcatttcccgccccagcccgcgtccgcgcgccgccggcgtcagccataaaaactgtagctgcggcttgctggcagtggttgccagtacggcgaaggcctgctgctgcagcgtcaacgcccgacagggcaaggtaataaaggtcagcggatccagcagccacggcagttgcccttccaactccaggcttgcatgacgcagcaggctcagcaaatcgtaatcctccaggggggactcacgcggctccgcttgccccgcgctgagatagccgcacagcccgtgacgtaccgtaaagcccaatgactgatacagcgccaccgcccggtaattatcgcggatcacctccagccacattcgctgtacgccctgagcgcgtaaatcggcgatcagcgaggtcatcaattgtcgccctcgccctttgccgcgaaagccgggatgaatagcaaaagccgccagccgcgcatcgcgcccgcggcgggcgatgagcccgatagccgccggttcatctcctgccagccacaccttagactgcaacaggtttaacccttcggcgctaaagcgctgtacaaacagatctaccgacatcgacaccggcaccagataatcggcaaagcagtcattcaaaatcgtagtcaactgcgcgccgctaaactggacggcaggaacggcggtgaactccatgcatttctccctgaggctgctatgctgaggcgatgaaaactaacactataaaccccactatcacttttcgcctgaccgaagaaggcgatctgccgctgttgcccgcgctggagcgttcggcggcacaatcctttgcgcgcattcccgccttcgcctggctggcggaaagcccggtaatgagcgttgaacagcaccggcaatacctggaaaccggccatagcctgctggcgctcgctgacgacaggcccgtcggtttcctgctgagcgagccgctggacgatgcgctgtttattgtagaaatctccgtccataagcagtggcagggccagggtattggccgtgccctgcttagccaaactatcgacaacgcccgccgcgacggcttcccggcggtgacgctcaccacctttcgcgaggtgccgtggaacgcgccattttatacccggctgggcttcaccatcctcaatgaactgcatctacccgaagggctggcggcgaaacgcgcgctggaagcagagcacggcctgacggcggaaacccgctgcgcgatgcgccttgatttttagcgctgcgagaggcgccgcgctgattttgtcaccggtctataccctaaataattcgagttgcaggaaggcggcgacgcagagaatccccaggagcttactctagtaagtgactggggtgagcgaggaaagccaacgcgcctgcaacttgaagtatgacgggtatatggtacaaagtaccattcccaatacataacctgatacccggaatggcctactcgatcgatatcatctcctgcatcaccgaccgctttatggcgctgaccgcgaccgaaaagcgcattgcgcagtttattctcgacgacgtcgccgccgcggcggaaatgccgattgccgaactggcgcgcctgaccgacaccagccaggcatcggtgacgcgctttgcgcgtgcgctgggttgtaaagacgtacgcgaactgaaaatgaagctcgcccagtcgctggccattggtcagcgctttattctcgatgtgccggatctggaaggcgtacagggaatttatgaatcgattatcagcgtactggaaaccaaccgccgggcgctggatcttgcggcgctgaaacgcgcggtggaatggattagcggcgcccgccaggtgcttgcgctgggtatgggcggcggctcgaccatctgcgcgcaggagatccagtatcgcctgttccgcctcgggttgccggtagtcagccagagcgacggcctgctggttcgcatgatgagttcggcggtgacggcgaaagatgtggtgattgtgctgtcgctcggcggctataccaaagagatgatcgaaagcgccgctatcgcccggcaatacggggcgaaaattgtcgccattaccccaccggaaacgccgctggcggcgcaggccgatatagtcctgccgctgctggtgagcgaaaacgactatatctttaagcccagcgcttcacgctatgcgatgctggcgatggtggatgtactggccaccgagctggcgatggccaataaaccgcaggcgaaagaccgcctgcgccgcattaagctggcgctcgacgaccaccgcgacggcgtcgaccgactgccgctcggtgattaatcgccgcaggcggcgataaagcgttgcgcctgctgacgggtacgcgccaacggctgcccggcgcggtagagatcgctgcctaatcccgcccccgcgcagccagcctgacgccagctgtgcaggttttccggcgtcaccccgccgaccgccagcaccggaacctccggcggcaacaccgctttcagcgcgcggatatagtccgggccgaatgccgatgacggaaagattttcagccattgcgccccggcatccagcgcgctaaacgcctcggaggccgtcgcgcagccggcgcacaccaacatccccttatctaccgcgcggcggatcaccgccggggccgtattaggcgtcacgataagtttcgccccggcttcagccagaaaatcaacctgctcaaccttcagcaccgtccccgcgccaatcaccgaccgctcgccaaactggcgcaccatcgccggaatactttgctgccagtccggcgagttaagcggaatttcaatatagcgaaaacccgcatcgataagcgcggcgatatgctccgccgcctcaccaggctgaataccgcgtaaaatcgccaccagtttaaccttgtccatcaatcatcctcgcaatacccgaaagaaacgccgcctcgccggaacaacaggaaacgtccagcccgcgcgccgccatcgcctgctgataacgagcgctgagcgagtgctcaccaaccagtaccacgcggctggcgcgatagcgttcgctaaaggtcgccacctccgcgccaatcaacagcccggagagataatcgctcaccgaagtcgccgccaatgcgcctaacacccgcgcggcgcgggcgctaaaaagcccggacaataacgccggctgatttaaccctttttccataccgagggcgaaagcggcttcatccggcaactgcgcaggcagttgctggccgagcagcgaatggttaagcagcaggtgatgcagttcgccggtcatcgccgtggcgaactggcgcaccacgccgttttgcacctgcacccatttgcagtgggtgccgggcatcacgtaacactcggcgggcatcagttgccaggctcccagcagctgcgtttcttcacctcgcatcacgtcgtaatctgcggcctgcgctactttcagccccggcacgatccacactttttccgccacctcatgtaactgaccgttgagcgcctccagcgccagcgggcaggccagataaggcaccggttgccaaccggcatcgctgccgatcatgcccgccatcaccaccggcagcgcggggtcgccgcgccacggcgccagctgctgctgaaataccgcttcggcgcgctgcccgttcagacgcgtgacaccgcagggcagttgcagcttatcgatacactctccctcgcggatccgccatgcccgcagctgcgtagagccccaatcgacggcaatatactcgttcatgattgccccttacccgcgtgaggtatgacgtttgccaatcggcagcggcggcggcgttgggcggctttcacgctcgcgggtaatcatctccagcgcctgctcgcggctcatgctgctggccggggtcagtaacgtcaccacaaccgaagccaccaggctcgtcagtaccgccggaatacacgggttgccccagaaagccaaccagtcgttatctaccagcaccgcaaccgatgcccctgcgccgccggccagcgcggcgaccgcgccctgccagttaaaacgtttccagaagcggccaagcatggtgcagataaacatgccggacataatcatcgagatcattttggtgatatagctgatgatgtcgttggaggtcagagcaaacagcagagccagcgcaatcaccagaaccaggaagatccgcgacaggcgaatggctttctccggcgcgggcatatggccggtcaccagggtgtagaggtcgcgcagcataatggacaccgcggcgatggcatcagagctaccggaagacatattggccgacatcccggcaatcaggatcgccatcgccagcaccggcggcagcacctgagtggcaaataagaaggcgaagccgctgttttccagctgcgggttcatggtccataccgccataccgatgatcgccggcaggaaggagaagcccagatacagcaggccggtaatggtaaaggactggcgcaccgaggagacggtcttcgccgagtaaatacgctggcgataagaaggcgtcgccagcacgccgacgccgatcaccatcgccagcgatagcgccggcaacacgcctaatttatcgaccgcgaacaggctttgcgccgccggatcgacggcctgctgaatatggctccagccgccaacgtgatgaaccgccagcaccgccattaaaataaagccgacgaacagcacgatcgattgaatggtatcgatccacaccaccgcggaatagccgccaataccgacataaaccacaaaagccagcgcgataataattttcgcgacattaatatcaatgccgctggcccacgccagatataatccgccgcctaatatatgcgcccccagccagccgatagaggcaataaaaataagtatcgcgacgaggtttttaataattttactgccgccggtgtaatacgacatttcttcactcatggtcatgaagcgaagtttacgtaccggcgcgaataaccatgccaccagcaggatccccaccgcgccgccgaggccgtaaagcatcccggcccaaccgttgctgtagccaaagccgacggcgccaacgctggacccggtccccaccatggtgccgaccgttgaaccgagagtgaggatcatcggcagcgaacgaccgccaagtaaaaaatcttcgccggttttctgtttgcgcgaaacgtaccagcctaaggtaatcatcgcgcaggcataaacggaaaaccaaatcataaatgacatattattcattgctcacatccagacgtaataaataatattcgtgccgctgaatattatgagttaacaggaaccatgcctgaaaaaaggcatagcgaacccagtggcaccaatttacttattcactctggtgccgatatcacactttttggatactccctcccgaaaagggagggatttatttttaggtttcgagcgttattgtcgcgtagcgttaaaacaggtcacatccacttctactttacaatccaccaccaggtccgccacgcaacaaatgcgcgctggcggattatcgccaaagaactcgcgaaaaaccttattgaacgactgaaaatagcgcgcgtcggtgaggatcaccttcacgtgtaccacgtccgccaggccgtaaccggcttcgctcatgatgtcgacgcagttctggatcgccagccgcgattgttcgacgatgccgccttctacgacttcgccatttttcatcggcgtctgcccggagacatatagccagccgccggcttccaccgcgcgggcgaacggcagatgctgaccgccggttccggtaccgccttctacgccataacgtttgatactcatactcaactccttagtccatccgacggcgcaggaaacgccctgcccgcccggtaattttcttatcactgccgtagctcatcacgccgttgaccatcaccgcctcaatgccgtccgccggtcgtttcgggtcggagaaactggcgacatcgcgcaccgtctgcgggtcaaacagcaccaggtcggcaaagtagccaattttaaccagcccgcgatccgccagctggaagcgcgctgccgacagcccggtcatcttgtgcaccgcggtagtcagcgggaatagctgctcgtcgcggctatagtgaccaagtacccgcgggaaggcgccccacaggcgcggatgcggcatcggatcgttcggcagcccgtcagagccaatcatggtgaccggatagcgcatcacccgccgtacatcctgctcatccatgttgtaatagatagcgcccgccggcatcagccgcgccgcggcatcgtgcaggctcacctgccactcatcggcgatctgctgcagcgttttccccgcctgctccggctgcgcttcggaccaggtgatcacgatatcaaactcatcggtcacctgtttcatatccagcgtcgacgagctggcggagtagggataacagtcgcaggcgatatcctgctgctggcgcatctcatcgaaaaacgccagcgtctctttggtacgcccccagtttttcgccccggcgcacttgtggtgtgagacgaccaccggcacgttgccgtgacgaccgatgcggaaggcttcatccagcgcctcgagaattggctcaaactctgaacgtaaatgggtggtatagacgcccttcccggctgccagctcttccgccagcgccatcacctcttcggtagtcgactggaaggcgctggcgtaggccaacccggtactgagccctaatgcgccctggcgcaacgcatcgcgtagctgtacgcgcatgccggcgatttccgtctcgttcgccggacgaaacagatcgtccatatggttattacgcagcgcggtgtgaccgattaacgtgccgacattcagcgacggccgcgccgcttccaccgcatgggcataagcctccacggtgggatagataaagtgctgccgctcgccgaggagattcatcgggtccggcacttccccgcgcatggtagcggtcgccgcgctgatcccgcagttgccgacgatcaccgtcgtcaccccctggctgagcttcggcaagtactcaggcatacggatcacgttgatatcatcatgggtatgcacatcaataaagcccggcgccagtacccgccctggccatcaatcacctgctccgccgcgacatccagcgccggggcgatagccattattcggtcgcccttcaccgccacatcagcacggtattgcggcccgccgctcccgtcgatcaccgtgacgtttttgaaaagccagtcaactttcatagcaattactccctttcgacatgtcgacaagttaaccatttacaagcgcaaaaaacagtggaaaactacgcaaaacccagatcactttgtgatacttttattcaaaaagaataacatttttatattaaaaatatatttatcaaatagttataaatgatacccagcgactaaccgattataaaccctgaaaggatagtgttatgaaataccattcagcaccgctcatcccgcacaaatccgccctcatgtccgcgccggctaatctgctggcggaagaggtctgtctgcccgccgcgctgttaaaaaagtcggcgctggaaaataatatttcatggatgcagcgttacgccgacgcccgcggcgtgtcgctggcgccgcatggcaaaacgacaatgacgccatggatatttcaggcgcagcagcgagcgggagcgtgggggatcggcgtgggcagcgcctggcaggccagcgcggcgatggccagcggcatccaacgcgtcctgatggtcaatcagctggtcggcaaggccaatatgcaggtggtcgcgcagctaaaagcccactatcgggcagtggattttatctgctgcgtcgatagcgaggctaacgtacgcaccctctccgcattcttcgccgcccaagggcaaacgctggatgtgctgattgaacttggcgtgccgggcgggcgctgcggctgtcgtagcgttgatgacgcgctggcgctggcgcagcgggtaagcgatctgccggggttacggctacgcggactggaattgtatgaaggggtgctgcacggcgacgatccgcagccgcaggtggaagcgttattacaacaggccgcggcgcttgcctgccgcatggagccgctggttgacggcgaatttattctcaccggcgcgggcaccgtctggtatgacgtggtgtgcaacatctggctggcggcggcaaaaccgcgccgctgccgtatcgtcatccgccctggctgttatatcacccacgatcgcgggatctacgatctcgcacaacaagaactgatcgcccgcgatccgattgcctgcgatctcgccggcgatcttgcatcagcgctggagctgatggcgatggtgcaatcggtgcctgaggcggatcgcgcggtggtgaatttcggcaagcgcgactgcgctttcgacgccgggctgccgcagccgatcgcccattatcgtaacggccagcagttagcgctgcgcgcggagtcgatcgtcagtatcggcatcatggatcagcactgcatgctgcgcctggcgccgggtagcgatgtgcaggtcggcgatattctgctgttcggcacctcgcacccgtgtctgacctttgataaatggaaaacacttctgctggtcgatgacgactacaacgtgctggacgagctcgacacgctgttttgacaggcatcccgggtggcggcgcttcgcgccttacccgccctgacgcaaggcgcaaatctcatcatgcaatgaacggctgatggcgaccccctgccgctcactctgctggcggcaggcgaaacgccgctcgcccggcagccgcgcgccctgatcctgcatcgcattgaacagcgtttcggcgcgcgccagctgctcttgtgcctgcgcaccgagaaagcgctgcggatccagcgccaggataagctcgccgccgtaggggagaccgcccgcgccgttatcccacgccagcgattcggcgctggtcatatcgccaataagcggcccggccagcagctcaaccattgccgccagcgccgagcccttatggccgccgaaggttaacatcgcgccgttcagcacctctgcggcatcggtcgttggctgtccctgactgtcgattccccacccttgcggtagcgctttgccggcgcgctgatgcagctgtatctcgccgcgcgccgcggcgctggtcgccatatcaacaataaacggctgtttgtcccgccgcggccagccaaaagcgataggattggtgccgaacagcggacgcgtgccgcccgccggggcgacccaggcgtggcttggcgtgcaggccagccccaccagccctgcctcggtcaacggctcaatatcggcaaacagcgcggaaaaatggacgcagcggttaatcgccaacgccgcaatgccgctgtgccgcgccttctctagcagtaacggcagcgcgcgctcgtaggccagcagcgaaaaagcgccgccggcgtccgcccgcgcaatcgccggcgcctggtcgtggatttgcggctcggcatcaggcgataccttacctttacgcaaagtatcgacaatgcccaacagccgccacaggccgtgggaagcgcagccgtcgcgctccccggcggccacattacgtgcaatggccgccgcgtggtcggcgctaaatccattggcgctgagtacctccagcgccaggtcataagcttcaggtaacgatagagttaccgactccatactgttctcctttactcttcttcgtctccgctaaagttagcctgcggcaggcagctgcgcgcgccccagtaataaatccccaacgacatcgccgccaccagcaccgtatcccaggggtgaccgataacattaagcccgccgaagctgcccagccaggaaaagaggataatcaacgcataaaaaacgatcagccacagcgaagacttcacctgctgcgccaggctcacggtatgttccggcaccttacctttgcacatcacgtagacgacaaacatcacgatttgcagccccaacagccacgagagcgtattccagccggaccagtagactatcagcgccgagatcataaacgatatcgggccgatgatgccgaaggcgcgcacgcggaacggccgcggtagatccggcgcgttgcggcgcagcccggcggcagtcaccggggcgatggcgtagctcagcaccagggctgccgataccacgctaatgagttgttcccaggaggggaacggcagcgtccagaaaatcgacagtccaaaagtcagccatagcgccgggcgcggaataccggactctttatcaatatgggtaaaggctttaaagaaggtacccgccttcgcccagccgtagatcacccgcggcgtcgcgttcatatagatattgccggtgccgctcggggagatgatcgcatcgcttatcaccataaaggccagccagcccatgccgagggtaatagcgatatcgcgatagggcagcgagaactgtttgctcacctcggcccagccgccgttcagcatctcggtggggatactgccaaggaacgccagctgcaacagcacgtagataatcgtcgacagcaccactgataaaatcaacgcaatagggatagtccgctgcggcttttgtacttcgctggccaccgagataatcggcgttagtcccagataagcgaagataattccccccgcgctgatcgccgcttccaccccggacatgccgaatggcgcaatgccctgagcgtgcaggttctccggtttaaagaaggcgaacagcgtcaccaccaccagcagcggcaccagaaacttgagcacgctgatgaagttgttcgatcgggcgaaggtcttaacgctgtaatagttaagcgcaaagaagaaacagagtagcaagaactgcaccacccaccccagcagcgtcggcgaactggagcccggttgggtcagcgccggaaaccaggcggcggcatattgccgggcggcgacaatttcaatcgagatcaggctggagaaagcgatcagggtgataaaccccagcagatagcccatcagctcaccgtgggaaaagaccgggtagcgaataatgccgccggcgcgcggcagcgctgcccccagctcgcagtagacaatccccaacagcaatactgcaaaaccgccgatcacccacgacgcgatcccggccggaccggcgatggatgcgacgtggctggcggcgaataaccatccggagccgaaaattgcccccaggccgataaacgtgagatcggttagggtcagctgttttttaaacttacccgactctgcaacgcgggtttgactgttatgcgtagagtgaatggtcatggtgatgcccttgcgtcaatgagaggaggaaatcgcttcccgggtccactggccgttgaccaggcgcagcaggttcaaagggttcgcatcctgcagcgccggcggtaacagggcggcgggcgcgttctgcagacagaccgggcgcagaaagcgttcaatcgcccggctgccgaccgaggtcccgcgtgcgtcggtggtcgccggccacgggccgccgtggaccatcgcatcgcacacttccacgccggtaggataaccgttaaacagcacccgtccggccttctcgcaaagcagcggtagcaggctcgccgccagcgggccatcatccgcctcggcatgcaccgtcgcagtaagctgaccctgcagcgctttcaccaccgccttcagttgggcctcatcatccactaccaccagtagcgatagcgggccgaaaacttcagtctgcagcagcgtatcctgcgccagcagatcctcgacctgagcctgccacagcagggtctgcgcctgcccggcgccggcggcgatgccgctcgccaacttctcgatacgcggatgcgccgcaagcgccgtcacgccctgatggtagtgctgaagggtcggcgcattgagcaacacctgcggcggggagcccgctaccgccgcgcacagcgccgacttaaagcgttccagcccggcgtcgcgcagcgccagaatcagccccggacgggtacagaactggccgccgccgagggtgaatgacgccaccagctcgttcgccagcgcctcggcccgcgtctgcagcgcctgcggcagaataatcaatgggttaatcgccgacatttcagcaaacagcggaattggctgcgggcgctgctgcgccagctgatacagtgccttaccgccggccagcgaaccggtaaagccaacggcctgaatcgccggatgacggactaattcggcgccgatatcggtcccgaaaatcatattgaatacgccgccgggtaaaccgcaccgcaccaccgccctgacgatcgcctcggcggtcagctcggcggtggccatatggcccggatgggccttcaccaccaccgggcagccagccgccagcgccgaggcggtatcgccgccggcggtagaaaaggccaacggaaagttgctggcgccaaacaccgccaccggccctaacgcctgttgatactggcgcagatccgggcgcggcagcggctggcgctcggctaaggcggtatcaatacgggcggcgaaggtatcgccgcgctggatcacgccagcaaacatccgcaactggccgctggtacgcgcccgttctccctgcagccgcgccagcggcagcgcggtctcctgcccggcgatagcaaaaaacacctcgcccagcgcatccagttcatcagcaatggcgttgagaaagcgcgcccgctgctgcggcgtggtttgtgaatagacggcaaaggcctgctgcgcggcttctgcggcctgagcggcttcctcacaggaagccggataaaagcggtggccggtggcttcgccgtccaccgcccgcaggctcaatagcgtcgcctcaccgctggcaatacggcgtccggcgataaactgccgtcccgccatggtctgagatgcattcatattgactcctgtgctcagaggccgacatccggcagcgtcggacgagtggccagcgcctgttcaacgatcgccaccacctgctggcgcgtttcgccttccagcgccagacgcggcggacgggtaatggcgctaccgcggcccagcagttcctcacacagcttgatgcactgcaccagatccggacgcgcatcaagatgcagcagcggcatgaaccaacggtacagcgccatcgcctcttcgtaacgctgctggcgcgccaggcggaataacgtttctccttcgcgcgggaaggcgttggacatcccggagatccagccttccgcgccgacggcgatactttccaccaccacgtcatccagcccggcaaacagcacgaagcggtcgccaacggtgttacgcaggtcgataaagcgacgggtatcgccggaggagtctttaaagcagacgatgttgtcgcagtcggtcagggtggcgagaatgtccggcgtcacgtcgtttttgtaaatcggcgggttgttgtagaccataatcggcaggtcggtagcgctcgccacgctgcggaagtgggccgcggtttcatgcggttttgaggagtagaccagcgccggcatcaccatgatcccgtcgacgccgacgcgctccgcctctttcgccattttctgggcaaaagcggtggtgaactcggccaccccggcgatgaccggaattttgccgccggcagcatctttcgccacctcgataatctgcagtttttcgtcggtgctcagcgaggtgttttcacctacgctgccgcacaccaccagcccggaaacgccatctttcaccaggtttttcatcaccgcgtgagtggcgtctaaatcgagggagtaatcgctacgaaactgcgtgctgaccgccgggaatacgccgctccagtgaatcgcttttttgctcatgctcggttccttgtcgtcattttgttaagtcaaagtgaatgaatggtgaatattcactgacagattgacgtgtcgcagaaccggcggcttgtcggttttccctcaatacgatgacgaaattagcacagtcgacaaaagtgtgagccagcgtttatccgagcagcgtgaggcgaaaatcacgcggcgtcgagccggtcatcgccttgaactggcggctaaaggcgctgtgatcggtatatccgcactgcaaggcgatatcggtaatcggcgtatcgccagccagcagttcggtagctttttccagccgcactttgtggatcatttgccgcggagtgagatgaaagatccgtttgcagtagcgttcgatctgcgcaatcgacatcccacttaaggcggttaattcttccatggcgatcggccggtgataatggcggcggatatgatcatcgacgatcgccagccgctgccacgccggatgacgggcatgggcctcctgcagatcgtgcgagatcccggccatgccgatcacctgcccgctgatatcgcgtagcgccagtttctgcgtcaggcaccagccgcgctcgcgtccattgtagagatgcatttccagctgatcgcgcagggtcacgccttcgcgcagtacccgaagatcctgttcggtataaccctgacccagcgcggaaggaaagacatcggcggaggttttgcccagcagcgaggagacgcttttgaaaccacagcggcgggccagcgtcaggttcgccagcagatagcgcgcctgacgatctttgataaaaaagaccacattaggaatggcattgagcaagggcgcaatcagcgccagcgcattcagcagcgcgggcatattttccggccgctggcgcgccagcccttcacagatctggctcagctcatcgacggccagctcaggttggttaaccgcccgggcggcggcgcatcagaaacaccgatcataaggcctcctcatggtaagtgaccgaaggatatttattcactttccgttaacacctcaagcagcaaccgtcggttttgcgatcctggatccgctttacgccttcccctggtttagccactggcacaatggtcactttcggtttaccacagcattaagcaaatgattaataagaaataactatgtaaaatagaaatataccgcgctcattactgtgcagatttcgtcattttctctgacgaaagcgctcaagcaggtcgggaaaggttgcgccagcatgatgaaacatgttgttaacttccggagagcctgatgaccgcgccacgccccctattacgctgagagctattgattcacacaccggcggtgaaccgacccgcctgatcgttgacggattccccgacctcggcgacggcagcatggcggagcgccgcgtccgcttcgcccgcgacttcgaccattggcgtcaggcggccattctcgaaccgcgcggcaatgacgtactggtcggcgcgctgctgtgcaaaccggtctcgaaggcggctaccgctggcgtgattttcttcaacaacgccggttttctgaatatgtgcggccacggcacaatcgggcttatcgcctcgctggcctggcttgggcgtatcaagcctggcgtacatctgattgaaacaccggtcggcgacgtaagcgccacgttgcacgacgatggcagcgtatcggtgcaaaacgtcccggcccgccgctggaaaaaacagatccgcgttgagaccgcgcatggtcccgtcatcggcgatattgcctgggcggtaactggtttttcctgattaacgaccacccgttcgccattacccccgaacatattccacagctcaccgactacgcctgggcggtgcgcgaggggctggaagccgcgggatccgcggcgacgacggaggcgttatcgaccatatcgaactcttcgccgatgacgataccgccgacagccgcagcttcgtactctgtccgggaaaggcctgggatcgctcgccgtgcggtaccggcaccagcgccaagctggcctgcctggcgcaggatgacaagctgcagccgggggaaatctggcgtcaggccagcatcatcggcagccagtttaccgccagctaccagcgcaccgctgaaggcatcatcccaactatccgcggcgaagcctgggtatgcggcgataaccaattgatcctcaaccctgacgatcccttctgctggggatcgcgccgtgaagcagtgcgacgtcatcgtgatcggcgccgggatcatcggcgccgcctgcgcgtggcagctggcgaagcgcgggcagagcgtgacgcttatcgatgacggtcagcctggcgcgacggcggccggtatgggccatctggtgtgcatggatgacgaccccgccgagcttgcattatcggcgtggtcgctggaacgctggcgcgctatcacgccacggatgcccgacaattgcgcctggcgcggctgcggtacgctgtggctggcggaaagcgaagaagagatggccgtggctagcgacaaacagcggcggctggccggctatcaggtgcacagcgaactccagaccccgcagcagatcgccggacgcgagccgctgctgcgcagcgggctggccggcggcctgtgggtgccaggtgatggcatcgtctacgcgccgaacgtcgcccgctggttgattaccgatgccggaaaccatcttacctatctgcgcgatagcgtacagacgattgaagagccgcaggtgcagctcgccagcggcaaacggcaacaggcgcgggcaatcgtggtggcctgcggacttgaagccaacacgctgttagcggaaaactggctgcgaccgaaaaaaggccaactggcgattaccgatcgctatgggccgcgggtgcatcaccagttggttgagctgggttacggcgccagcgcccacggcggcggcacctcggtggcgtttaaccttcagccgcggccaaccggccagctgctaattggctcttcgcgtcagtttgataaccgcgagcgcgagttggatctgcccttgctggcgcagatgctcgatcgcgcccgccatttcgtgccggcgctggcgacgttgaatatcatccgctgctggagcggcctgcgcgccgcctcgcaggatggcaacccgctgatcggcccgcaccccacccgccgtggtttatggctagcgctgggccatgaagggctgggcgtcaccaccgccccggcctcggctgaactgctggcggcgcagatcctcgatgaacgctgcccattggctcccgacgcctggctcccggctcgtttatctcaacaggaggcgatcgcatgaatgccacgctcactatcaccgtcgatggcgaagcgctgacggtgccggaagggatcagcgtggcggcggcactggtgttgaccggcgatccgaccacccgccaggcggttaacggcgacctccgcgcgccgttttgcggtatgggcgtctgccaggagtgccgggtcaccgtcgatggcctacgggtgctggcctgccagaccctgtgccggtccgatatgcaaatagaaaggagccgcgatgaacacgctgcgctgtgacattttaatcctcggcgccggccccgcagggatggcggccgcgctctccgccgccgcctgcaataaacaggtgattattctcgacgataatcccgccctggcgggcaaatctggcgtgccggtccgcaggcgacgcagcccgccctggcccggcgctaccgcgacgccatcgccgcgtctgccgccattcgggtagtgaacggcgcgcggctgattgcccgcccctccgcgtacagcgtgctgtttgaaaccgccgacggcggtggcgtggttcactggcagaaactgatcctctgctgcggcgcgcgcgagctgtcgctgccctttcccggctggaccttacccggcgtgaccggcgcgggcggcctgcaggcgcaaatcaaacagggcctggcgctgaaaggagaaaaggtggtgattgccggcagcggtccgctactgctggcggtggcggatacggtgaacaaggccggaggcgaagtgacaagtatcattgagcaagcgccgctcccggcactgctgcgcttcgccggcgggctgtggcgctggccgcagaagctgcgccagttagcgacgctggctccgaaaggctatcttagcggcacgcaggtgatccgcgctcacggcacaacgcggctggaagccgttacgttgcgccagcgcggcgtcgagcgaactatcgcctgcgatcggctggctatcggctacgggctgatacccaatatcgagacagcgctgctgtttggctgcgccacggcgcaggaggcgatacaggttaaccgctggcagcagaccagcatcgcggatatctacgccgccggcgagtgcaccggtttcggcggtagcgaactggcgctggcggagggcgaaatcgccggttttgccgccgccggggccagccagcaagcgcaggcgttatttgtccgccgcgcccgctggcagcgcttcgccgacgccataaaccgcgccttccggctggcggaatctttaaaaaacgcggcgacgccggagagcctgctgtgccgctgcgaagatgtacgctgcggcgatgtggcggccgccggaggctggccgcaggccaaacttacccagcgctgcggaatgggcgcctgtcaggggcgcacctgcgccgccagcgcccgctggttgtacggttggccgctgccgcagccgagagaaccgctggctcctgcccgcacggaaacgcttattgccctcgccaggttgagcgccgagccgtaaccgctactcttcttcatcaccgcgcccggcagggacgccaagcgcaataaactcctccagcagcgtggtcaactgacgcatcttctccgccgtaaactgcgcttctatctgccggtaggcctcttccacctgcgcctgggcgctctcatacagcgccagcccggcgggcgtcagcgacaggtagagcttgcgctgatcgttgaccggttttaaacgcaacactaaaccgtcgcgctccatgcgcgtcagaatcccggtcaggctggggcgcaaaatgcaggcgcgccaggccaggtcgtggaaatccatcgatgggttttccgcaaggatacgcacaatacgccactgctgttcggtcaggttgtggcgtttaacgatcggccggaaatggcccatcgccgcttctcgcgcctgcagcagcgcaatggttaatgaatcatgcatggtatcccctcaacaacgctcaccaaaaattattaacaatttaataattagccctaatcctgccatgtacaaccggtttctgcacctgaaaagtaccagccgtcattaaaaataaatatatctatatgataaataaaaaataaataaaaaagatgtaaatattgtgttaatccgatcacaaaacattcacttctatttgccaaaccggcgcgcaaagaataaaagatgatcattaacatattaatgaaatcccttcgaatcgataatcagtaccagaggagtggtgaatgaaaggtaccatcttcgccgttgcgctcaatcatcgcagccagctcgacgcctggcgcgaagcgtttcaacaggccccctacaagacgccgccgaaaaccgcggtctggttcatcaaaccccgcaataccgtgattggcgatggcgaagccattccccatccgcagggcgagaccgtacaaagcggcgcgacggtggcgttgattgtcggcaaaaccgcacgtaaagtggcggcggaagaggcggcgaactatatcgccggctacgcgctggctaacgacgttagcctgcccgaagagagtttttatcgcccggcgatcaaagccaagtgccgggatggcttctgccccatcggcgcgctatcggcggcgcacaacgtcgacgatctgaccatcatcaccgaaattaacggccgcgaggcggatagctggcataccggcgatctgcagcgtaatgccgcgcagctgcttagcgccttgagcgagttcgccaccctcaatcccggcgacgcgatccttatcggcacaccccactctcgcgtcacgctgcgccccggcgaccgcgtacgtattctcgccgacggtttcccggcgctcgaaaacccggttgtcgcagaaggagagctggcatgaaacaggcacgtattgaatggcaggggcaggtacgcgacgtgctggtcgatgaacgcgaccaggtgcgcctgcacgatggcacagtattgaaagaaggtgaattccgctggttgccacccgccgacggcacgctgttcgcgctggggctgaattacgccgaccacgccagcgagctggagtttaaaccgccaaccgagcctttggtgttcatcaaagcgccaaacacctttattggccaccagcagcagtcggtacgcccggataacgtcgaatacatgcactacgaagccgaactggtggtggtgatcgggaaaaccgcgcgccgcgtcagcgaagccgaggccatggattatgtcgctggctataccgtatgcaacgactacgcgatccgcgactatctggaaaactactaccgcccgaacctgcgggtgaaaagccgcgataccctgacgccgattggcccgtggatcgtcgccaaagaggcgatcccggatccgcataatctggccctgcgtacctgggtcaacggcgaactgcgccagcaaggcaccaccgccgatctgatcttcagcatcccgttcctcatcgcttatttaagcgaatttatgaccctgcaaccgggcgacatgatcgccaccggcacgccgaaagggctatccgatgtggtgccgggcgacgaggtgatcgttgaagtcgagggcgtgggccgcctggtcaaccatatcatcagccagcaagcgtatgaggagacactgtcatgaaaaagattaaccattggatcaacggtaaaaacgttgccggcgcagactattttcataccaccaacccggccaccggcgaggtactggctgaagtcgcctccggcggcgaagccgaaatcaaccaggcggtagcggcggcgaaagaggccttcccgaagtgggctaacctgccgatgaaagagcgcgcgcgcctgatgcgccgcctgggggatctgatcgatcagaacgtcccggagatcgcggcgatggaaaccgccgataccggcctgcctatccaccagaccaaaaacgtgctgatcccgcgggcgtcgcataacttcgaatttttcgccgaagtgtgccagcagatgaacggcaagacctatccggtcgacgacaagatgcttaactacaccctcgtgcagccggttggcgtctgcgcactggtgtcgccgtggaacgtgccgtttatgaccgccacctggaaggtggcgccatgcctggcgctggggaataccgcggtgctgaaaatgtccgaactgtcgccgctgaccgccgatcgtctgggcgagctggcgctggaggccgggatcccggcaggcgtgctcaacgtggtgcagggctatggcgccaccgctggcgacgcgctggtacgccatcatgatgtgcgcgccgtctccttcaccggcggcaccgctaccgggcgcaacatcatgaagaacgccggtctgaaaaagtactccatggagctcggcggaaaatcgccggtgctgatttttgaagacgccgatattgagcgcgcgctcgacgccgcgctgttcactatcttctcgatcaacggcgaacgctgcaccgccggttcgcgcattttcattcagcagagtatttatccggagttcgttaagcgtttcgccgagcgcgccaaccgcctgcgcgtaggcgatccgaccgatccgaatacccaggtcggcgcgctgattagcaagcagcactgggaaaaagtgtccggctacattcgcctcggcatcgaagaggggccaccctgctggccggcggcgcggataaaccgtccgatctgccggcgcatctgaaagccggcaacttcctgcgcccgacggtactggcggatgtcgacaaccgcatgcgcgtcgcccaggaagagatttttggcccagtcgcctgtctgctgccgttcaaagacgaagcggaagggctgcgcctggccaacgatgtggaatacggcctggcgtcgtacatctggacccaggacgtcagcaaagtgctgcgtctggcgcgcggtattgaagccggaatggtgttcgtcaacacccagaacgtgcgcgacctgcgtcagccgttcggcggcgtgaaggcctccggcaccggccgcgaaggcggcgagtacagctttgaagtgttcgccgaaatgaaaaacgtctgcatctcgatgggcgaccatccgatcccgaaatggggagtctgatatgggtaagttagcgttagcagcaaaaatcactcacgtgccgtcgatgtatctgtctgagctaccggggaaaaaccacggctgccgtcagggcgcgatcgacggacataaagaaattggcaagcgctgccgtgaaatgggcgtcgataccattatcgtgttcgacacccactggctggtcaacagcgcctaccacatcaactgtgccgaccatttccagggcgtctacaccagtaacgaactgccgcattttattcgcgacatgacctacgactacgacggcaacccggaactgggtcacctgattgccgacgaggccgtcaagcttggcgtacgcgccaaagcgcacaatattccgagcctgaagctggaatacggcaccctggtgccgatgcgctacatgaatagcgataagcatttcaaagtggtgtccatttccgccttctgtaccgttcacgattttgccgacagccgcaagctgggcgaggccatcctcaaggccatcgacaaatatgacggcaccgtggcggtgctggccagcggttcgctgtcgcatcgctttatcgacgaccagcgcgccgaagagggcatgaacagctatacccgcgagtttgaccatcagatggatgagcgcgtggtgaagctgtggcgcgaaggcaaattcaaagagttctgcaccatgctgccggagtacgccgactactgctacggcgaaggcaacatgcacgacacggtgatgctgctcggcttgctgggttgggataaatacgacggcaaggtggagtttatcaccgagctattcgccagttccggtaccggccaggttaacgccgtgttcccgctgccggcgcaggcgtaaggaggccgtatgccgcattttatcgccgagtgtagcgacaatatccgcgaacaggccgatttaccggggctgttcgccaaagtcaacgaggcgctggccgccaccggcatctttccgattggcggtattcgcagccgcgcccactggctcgatacctggcagatggccgacggcaagcatgattacgccttcgtgcatatgaccctgaagatcggcgccgggcgcagccttgagagccgtcaggaggtgggcgaaatgctattcgcgctgatcaaagcccactttgccgcgctgatggagagccgttatctggcgctgtcgttcgccatggaagaactcgacccgacgctgaactacaaacagaacaacgtgcacgcgttatttaaataatgtgcaaattgcccggtggcgctgcgcttaccgggcctacaacggccatgaatttgtaggtcggataagcaaagcgccatccggcaatgcaatgccacaggaatcactatgctcgataaacagacccgaaccctgattgcccagcggctgaaccaggccgaaaaacagcgtgaacagatccgcgcgatctcgctggattatccgtcgatcaccattgaggacgcctacgccgtccagcgcgagtgggtcgagatgaagatcgccgaaggccgcgtgctcaaaggccacaagatcggcctgacctcaaaagcgatgcaggccagttcgcagatcagcgagccggactacggcgcgctgctcgacgatatgttctttcacgacggcagcgatattcccaccgaccgctttatcgtgccgcgtattgaagtcgagctggccttcgtgctggccaaaccgctgcgcggcccgaactgcacgctgtttgatgtctacaacgccaccgactacgttatcccggcgctggagcttatcgacgcgcgttgccacaacatcgacccggaaacccagcgtccgcgcaaagtgttcgacactatctccgataacgccgccaacgccggggtgatcctcggcggccggccgattaaaccggacgagctcgacctgcgctggatctccgccctgctgtatcgcaacggcgtgattgaggagaccggcgtcgccgcgggcgtgctcaatcatccggccaacggcgtggcctggctggccaacaaactggcgccatacgatgtccagctcgaagccgggcagattatcctcggcggctccttcacccgcccggtcccggcgcgcaagggcgataccttccacgtcgactacggcaacatgggcgccatcagctgccgctttgtttgaggagagcaacatgaacaacgcatttaaagaggcgctcaaggccgggcgtccgcaaatcggcctgtggcttgggctgtgcagcagctacagcgccgaactgctggccggcgcgggcttcgactggctgctgatcgacggcgaacacgcgcccaacaatgtacaaacggtgctgacccagcttcaggccattgcgccctaccccagccagccggtggtgcgtccgtcgtggaacgatccggtacaaattaaacaactgctggacgtcggcgcgcaaaccctgctggtgccgatggtgcagaacgccgaagaagcgcggctggcggtcagatccacccgctacccgcctgccggcatccgcggcgtcggtagcgcgctggcccgcgcctcgcgctggaatcgcgtcccggactatatccaccgggccaacgacgccatgtgcgtactggtacagattgagacccgcgaagcgctgaaaaatctgccacagatccttgatgtcgacggggtggacggtgtgtttatcggtccggcggatctcagcgccgatatgggccacggcggcaacccacagcacccggaagtgcaggccgccatcgaagatgccatccagcaaatccgtcaggccggtaaagcgccggggatcctgatggccaatgaacagctggcgaaacgctatctcgaactgggcgcgctgttcgtcgccgtcggcgtcgataccaccctgctggcccgcggcgcagaagcgctggcggcccgttttacccacaccgcaaccaccacaaccgataacaataaatccgtctattgaacggataatgtggagcgcaacatgactacctctaccctgcaacacaatgataataaagccgttgaagtagaaaaccgggtgatcaaaaagctgttccgccgcctgatcaccttcctgtttgttctctttgttttctcatttttggatcgcattaatatcggcttcgccggcctgacgatgggtaaagatcttggcctgacctccaccatgttcggcctggcggcgacgctgttctacgtcacctacgtgctgtgcgggatccccagcaatatcatgctggcgaaagttggcgcgcgccgctggatcgccgggatcatggtggtctgggggatcgcctcgacctgcaccatgttcgccaccagcccgcatacgctgtacatcctgcgcatgctggtcggcatcgccgaagccggttttctgccggggatcctcgtctatctgacctggtggttcccggcctatcatcgcgcccgcgccaacgccctgtttatgatcgccatgccggtgaccatgatgctcggctcgatactttccggctatatcctggcgctcgacggcctgtggaacctgaaaggctggcagtggctgtttctgctggaaggcctgccgtcggtggtgctcggcgtcgtcacctggttcttcctcaacgacacgccggataaagccaactggctggataacgaagagaaacaggcgctgaaggcgatgatcgatcgcgaacgggaacatgcggcgatcgtcccggcttcgccgcgctccacgctgcgcgaagtactgacgccagcggtgctgatgtataccctcgcctacttctgcctgaccaataccctcagcgccattaatatctggacgccgcagatcctgcagagctttaacaccggcagcagcaatatcatgattggcctgctggcggcgatcccgcagttctgcaccattttcggcatgatctggtggagccgccgctccgaccggcgcaaagagcgcaagatgcataccatcctgccctacctgttcgccgcggcgggttggctgctggcttcggcaacgcaccacagcctgatccaactgatcggcattattatggcttcggtgggatcctttaccgcgatggccattttctggaccaccccggatcgggtgatcagcctgcaatcgcgtgcggtagcgctggcggtgatcaatgccatcggcaacgtcggctctgccgtcagcccgctgttgatcggcatattacgcgataccaccggcagctttagctccgggctgtggtttgtcgccgggctgctgatcgtcggcgcgctggtgctcacccgcattccgatgagccagcgcgaggacgccgccgccgcaccgggcttagcggcgcaaaaaggccactaaggagcgggtatgtgccagcatccaatcgccaacatcgacatcaataaagattacgacgagagtctgggcaccgaagaggtgcactatcagtcgtttgcccgcatggcggccttttttggccgcgacatgcaggcgcatcgccacgaccgctattttcagatgcactttcttgataccggacagattgagctgcagcttgatgaccatcgctattcggtgcaggcgccgctgtttgtgataacgccgccctcggtaccgcacgcctttattaccgagtccgatagcgatggtcacgtgttgacggtgcacgaagaactcatctggccgctgctggaggtgctttatcccggcacgcgggagaccttcggcctgccggggatctgcctgtcgctggcggataaacccgacgagctggcggcgctggcgcactactggcagctgattcgccgtgaatctaccgctcagctgccggggcgcgagcataccctggcgctgctggcgcaggcggtatttaccctgctgctgcgcaacgccaggctcgacgatcatgccgccagcgggatgcgcggcgagctgaaattattccagcgctttaaccagatgatcgacagccactttcatcagcactggacggtaccggattacgccaacgagcttcatctgaccgaatcgcggttgaccgatatctgccgccgcttcgccaaccgcccgccgaagcggctgatattcgaccgccagctacgcgaggcgaagcggctgctgctgttttccgatagcgcggtcaatgagatagcctggcagctggggtttaaagatcccgcttattttgcgcgcttttttagccgccaggtcggctgctcgccaagcagttaccgggcgcaaaaagtaccggtgtcgtaataccccggcggcgctgagcttgccggggctacgctccatagggcaggtcagcgccgcgccgcccgccaaaagctgcagagatcacaaaattcactcccgcctgaaaagtacccgccgttgtcgcaaacgtcccttcacgacaagcgcaataaccgcttcaattaaacaacaaaaacaaaacatatatttaacatcattattccgataaatactgaagaggcccctatgaaacctgaagatttccgcgccgacgcgaaacgcccgttaactggcgaagagtatttaaaaagcctgcaggatggccgcgaaatttatatctacggcgagcgcgtgaaggatgtcaccacgcatccggccttccgtaatgccgcggcttctgtcgctcagctgtacgatgcgctgcacaaaccggagatgcaggattccttgtgctggggcaccgataccggcagcggcggctacacccacaaattcttccgcgtggcgaaaagcgccgacgatctgcgccagcagcgcgacgccatcgccgaatggtcgcgcttaagctacggctggatgggccgcaccccggactacaaagccgctttcggctgcgcgctgggcgccaacccggcgttttacggccagttcgagcagaacgcccgcaactggtacacccgcattcaggaaaccggcctgtactttaaccacgctatcgtcaacccgccgatcgaccgccacaagccggctgatgaagtgaaggatgtctacatcaagctggaaaaagagaccgatgccgggatcatcgtcagcggcgcgaaagtggtcgccaccaactcggcgctgacccactacaacatgatcggcttcggctccgcacaggtgatgggtgagaacccggacttcgcgctgatgttcgtcgcgccgatggatgccgaaggcgtcaagcttatctcccgcgcctcctatgagatggtcgccggcgcgaccggatcgccgtacgactatccgctttccagccgtttcgacgagaacgacgcgattctggtaatggataaggtgctgatcccatgggagaacgtactgatttatcgcgactttgaccgctgccgccgctggaccatggaaggcggtttcgcccgcatgtacccgctgcaggcctgcgtgcgtctggcggtaaaactcgactttatcaccgccctgctgaaacgttctctggaatgtaccggcaccctcgaattccgcggcgtacaggccgaccttggcgaagtggtggcgtggcgcaacatgttctgggcgttaagcgattccatgtgctcggaagcgacgccgtgggtcaacggcgcatggctgccggatcacgccgcgctgcagacctatcgcgtgatggcgccgatggcctacgccaagatcaagaacatcatcgagcgtaacgtcaccagcggcttgatttatctgccgtccagcgcccgcgatctgaacaacccgcagatcgatcagtatctggcgaagtacgtgcgcggctccaacggtatggatcacgttgaacgtatcaagatcctcaaactgatgtgggacgccatcggcagcgaattcggcggccgccatgaactgtatgagatcaactactccggtagccaggatgaaattcgcctgcagtgtctgcgccaggcgcagagctccggcaatatggacaaaatgatggcgatggtcgaccgctgcctgtccgagtacgaccagaacggctggacggtgccgcatctgcacaataacgctgatatcaacatgttggataagctgctgaagtaattcacagcgggaggtcataatgcaattagatgaacaacgcctgcgttttcgcgatgccatggccagcctgtcggctgcggttaacgttgtcaccaccgcaggtgaagccggccgctgcggcattaccgccacggcggtttgctcggtgacggatacgccgccatcggtgatggtttgtatcaacgccaacagcgcgatgaacccggtatttcagggcaacggcaagttgtgcatcaacgtgctgaaccacgaacaggaaatcatggcccgtcatttcgccgggatgaccggggtgacgatggaagagcggtttgccctcagcggctggcagcagggcgcgctcggacagccggtactgaagggttcgctgaccagcctcgaaggcgagattagccaggtgcaaaccattggtacccacctggtgtatctggtggagatccgcaatattaccctgagcccgcaagggcacggcctgatttactttaaacgccgtttccacccggtgatgatggaaatggaagtcgcggtgtaatggcctcgcctgcctctccccggataacggggaggggcaacacagattcgcgttagccttcctgctgggcaaactgtgtcagcaccgcaccaccttctggtactttccgcccgtatcgtagtttattatatggataggatcgctgcactggcgccgggatctttttaaatagctatattagtggatattaaatcgatgtttaatccataaaccaatgactattaccccgctaacaaacgagccaatctttatactcaaaaacaaataattaataactgaaaaattaatagttcccgtttcgaaataaaaaataattggcttaataaaaagtgcaagaaatgaactcaagctcatgattatcatcagaacagtgaaaacagtgagccaacgataaaaatcatttttcattttcagttctcttccacaaattattagtagttttagagccaccttgtcctgttgcttctgtaatgattgatgatatagcgttcccagatattccaggtatcggtgataaaggtaatggtttgcttattcccatctccaaattaacccactcgtaatttttccatgctggattaacccatttatctaatgaaattttggcaactttacctattccataaccgatacccgaagcggcaccacttattacgccacctttaaatggatcatcaccgttcagatagctggatgttgcactacctgccgcattccagcccacggttccccgggctcccgtatttgcagtaaaagctccaacatacgtcgcaatgagcacatccgctggattaacttctccattaataagatactggataccagcatttgccgttccgcctatcgcgccagtaacctgcattcccccggcaggtagattagccccgctgaagccaacgctcctgcataagctttattctcagcaattcctcgctggcaagcttcaccagacgggttatctgcgcatgagagaacatctgagccatgctctctggctttctcaccctggctccattcgttcccactcatcaggttattctccacaacaactcgtacatattgtggttattttctacgttgagaagaaaaatgattcatcaaccaggtaccaaccccgccaataacaccacctgtgatgcctaccttaaaactaacatacaacagttctttatacggtatattctcatttcctgaattcatttcgtttactaaaaaaatagccaactgtcccaaaaaagaaacagtagaaacaataatagcgcccattataactacatatgcaaggatgaataattctcgcttcattttattaaacctttttttgtgatagcgtcttcaacctttggtccaccctgagaggttgcttccgaagcagcagagccagatattgccccccaagtactgggacgagcgtcaaactgtaaaggcttacttatccccatccccatatcaacccactcatagtttttccatgtaggattgagtactttatttagcggcatttcaataagatacttacccatcccgtaacccagggctgaaccagcagcccccaaccagcaccattcagcgggtcatcacctttcaaataatttgacgttgcaccacccgccgcattccatccaatcgttcccaataatcctgtattagcagtagctgcacctgtatagctggctattaaaacatctgtcggtttaatttcaccagttaatgcatattgtattcctgcatttgctgcaccgcctatcccagcagttgcttgcatcccgcctggtaaataaattaacccagcggaagccaatgctccggcataagctttattaactgcttcgcctcgcttgcaggcttcaccacctggagcatcattacaggaaagtacatcagcaccatgttccctggctttttccgtctgaagccattcactaccgccaagtaaattattctcaaccgcgttcttcccggcctgcgcacccgccaccgcatccgcgctgctgcctccgctaagcccacccatcagtcccgccgccagcgtactcagcgcgcttatcgtcgacttctgctcatccgacagctcttctgtcttaacatccggataatattccgccgctatccagcggcccagcagctcgccgctcaccgcgcctgccgctcccgccagcacgctgcttcgaatcgtagttatcgctgtcctgctcactggtcagcgtcaggttacgcccgacgtccattgtcaccagatggccgcttacctgcgcccgatttcacttgccttctgcgccaccgccagccggttccactttttctccttgtcacacagcgggctcagggcctggttcggacattccgcatcccatcatccgctgcgagttctaccgccgggattggctgacaaaatgccgctccggatccgggtgatgcgggcgtcaaccgggcaaagatgctccagtggttgaagactttccccggcgcgcttaacgacatcggcgatctgccggtgatcaagcgaggcaaggggcatttttcgggagcgtaatcgctgataacacgatcccgacgctgcggccgggatcttttcgacatagattaaaatccctttactttaaaaaggcggaataatgcgagtccaatgcctccaatgcttccaccataaagtcctaatttcgctccgtgcaaaacatcctgccaagttgcattaaaaccatcgccaagcagccacagtaacaacgaaaaaaaaagctttccgcatacagataatgcgatcatgaataaaatcgtagcaactaagataaatagagactgtacacatctaactcggagatcatttttcatttttatctcctattttttttaatacctgttcagctcctttaccgcctccttctgatattactgaaactccaacattacccatgttgcctggaatcttacccggcaacatctccttagagatccccagttgacctttaatttcggtatatttcagcaggtcaggattaaacttaggatccctgccgccggttagccatttaccagccgcatttgtgcctgaagagattagtttgcctccccagtagccgccagcagaacccagaccattagtaattgctcccgttaaaggattgtcaccgttgatctgactggttagcgcgccaccggctgcattccagcccactgttccccataagccattccctatgcttgcaacgtttatccagccagccacagcagagttaaccggattcaccttgccatcttcagcatactgagcacctgcgtttacccctgcgcccaacccccacatcgcctgcgcggtaccgggtaataacgccacgcctcctgtagccagtgctcccgcataggctttgttttccgccaggcctcgctgacaggcttttcctgaaggattgtctgcacacgacagcacatccttaccatgctctctggctttctcaccctggctccattcgttcccacccatcaggttattctccaccgcgttcttcccggcctgcgcacccgccagcgcgctgttatttcccgatgccgccgctatcgctccccacaccgcgtgcgccatcgcattggcttccacattcaccttacccgtcgcgctgtccgtcgtctggctgtgaatgatttccgccacatacgggatcactgccccgctcgccgcctgcgccaccttctgatacttaccgcccgtatcggcggttcactgataactaagagcgaatgtaagcatttgggtaaaaccgacgactgaaaacactacccgtctgtatttcataagaacctgggtcaagttataactgactaaaacccctttactttaataagtttggataaaatgatcccacaacccaataccccacctccaaccccaccaattttcaaaccctttaatatttcagaacattctgtctcaatgtatccatacgccaaatatttaataaacagtaaaagaaaatatgatacttcagctattataactccggaaaacatagaaacagctatgataaagaaagcaaaaaacaatgacttcatcatttcccgccattagagtatttatcttcaattatttttttcatttcagttcctgtcatctctgatgtaatagatgaacccatattactagtagaggttggtattctacttggtaacatttccttagatagaccaagttgacctttgatttcagtgtatttgagccagttgtgatcaaacttgggatcccagcctcctgttatccactttcccgctgaatttacagagggcttcaagatatacttaccaaccccatatcctaatcccgagccaacactacttgttatagccccaactatggggtcatcccctttaatataacttgatgtcgctccacctgccgcattccatcccacagttcctaaccaaccagtttttgaggttgctgctccaacccaagtcgctatcaacgcatctgtgtaattcacttcacgagtcgtggcatattgtattgcagtattggctccgccaccgatggctgctgttatcagagccccttcggcaatatacctaacccaacagtacctgccagatgggctgatactactgcattcccttttgccacattttctgcaagatttcctttacagtctgtatcgcagtctggcgtctggctgaaccagaacccgaggtttgttccagcactcgctccgaaagcattattctccaccgcgttcttcccggcctgcgcacccgccaccgcatccgcgctgctgcctccgctaagccccccatcagtcccgccgccagcgtactcagcgcgcttatcgtcgacttctgctcatccgacagctcttctgtcttaacacccggataatattccgccgctatccagcgccccagcagctcgccgctcaccgcgcctgccgctcccgccagcgcgctgttatttcccgatgccgccgctatcgctccccacaccgcatgcgccatcgcattggcttccacattcaccttacccgtagcgctgtccgtcgtctggctgtgaatgatttccgccacatacgggttcactgccccgctcgccgcctgcgccaggttgccacccgccagcccctgcatcgccgccgttaccgcctgcgccaccttctggtactttccgcccgtatcgtagtccgccgtcgccgtccggctcacctgcgcgctgatttgctcctcgctcggactgccattccctcccgctaccagcttcgcccgcgccgctgcccgcgccgccgggtcgctctgcgccgcctgcgcgttcagcttgccctgcgtcaccagcacatcactcacctggcgcccgatttcacctatcttctgcgccgtcgccagccggttctgctctttctccttatcaaatatcggactcagcgtctggttcgcatgcgccgcatcccggcttaaccccgtcacgtcctgctgctgattcgcgccgtcgcggataacgatactgccctcgctcaccgccgcccgcgtcagcgtactgtcgctgccgctgccgttcgcccccatcagcaggccgctggccgcattcccgaggaactgccccgccacgctaccgctcgtgctcactcccgcgctctgctgctccacgctgtactcggcatagtttttaatatcccggaaacccagcgtcccggtatccagccggttcagctccgccgccgccgtgctcgccagcacgctgccattcagctgcgtatgcccgcccaccttcacatcaaaaccgccctcaccggcaaaaatccccgtctgcgcctccaccgacgcccaggtgctgtgcattttgctctggctaaggttaagagaacccgaaccgccgcccatgctgccgctcgcccccacgctgccgctacgctgcttcgaatcgtagttatcgctgtcctgctcgctgctcagcgtcaggttacgcccgacgtccattgtcacctgatggccgctcacctgcgccccggtcagcgtcgtatcgcgaccgctgacgatagtcacccgctcaccggcgctgagggtcgtttcgttatgcgtcaggctgttgcccttctcgtggcccttcgcgacgttggcgctggcgctgaccgtcagcccgttcgcgccctgaccgaagttaataccgacgccaaacgaactcccatggctctcgtttttaccgctcagggtgctggcgttctccgcagagaataaattcacatcgcgcgcggcattgagcaacgcgctgccgccggcctgcagctggctgccctcaacgttgatatccgtctccgtggcgataatgctgagattgttgccggccatcaggctgctgccgcggctggtgttctgcgtttgtcgctgagtggatttcgaggactggctaccccaggagaggttgacccctatcatgctctccggactggaatccgcagtctgcatctgcgatgcctgatacgcctgtacgcccgataatgccgactgcagcccgctcagcgcggcgaggcggccattgctctcggtgctggcctggttggcgctggaaaccgcggtattaatggcgctgcccaccatcccggataacgccagcgtcaggccgctggttttctgctccacggtatgggtctgggtgctctggttttccgctgccagaatattcacggttttaccggtcaacgccatattgttgccggccaccaggtcagatccctgaaccgtcaacacattgccggcgctcaggctcaggttgccctgtgaacttccgacggtactggcggcgctactcagctccgtcgttacatcggtggctttcagcgacgaactgccgacgctgaagccaacgccgccggtgccggaaaagccgctatgtttctcttttcgtagatggttttcctggcgactttcctcggcggtggtgatggtcaggttacgccccgccacaaggttgacgtcctgggtgccggcaacactgctgccggacaccagcaggtcgcgcccggcctgcatcacaatactgtcaccgctaaaattgctgccgatggcgttctgcgcccacacttcatcgtgagtggtgagcgagcggcgagccagcaggccgctgctgctttgatggctgttttccgtcaggtgccatgaggactcgccgctgctgaggttaatatcattgccggcggcaaccgtcaggctgctggtcgccgtcacgctggcggcgcgggcattaatatcgtggccggcggacagcgccaccgcgccgccgttaatttgcgtgccgatatcgctacgctgggtcaaggaacgatcgttgcctttcccccagcttccgctttcgctatgggtggtggcgagcgtctgtaggttgagatcgttgccggcgataatctgcgtctggctgcccgccgcgctgttactcaccatgcttgccgtcagattaatgttatgtaacgcctgcagccccagttggccgttttcattctggacataaatccccgcgggccgatcgaggctgatgttacctgggccgccgccgagggtgctggcgctgttgatatcacgcccggcttgcgcgatcaggctatcgccgccctgcagcgttccgccaatattgttgatatcagtacgcgcgtttagcgtgagctggttgccgccgatatagccgctgttatgaatgttttccgcggttagctgcgtcacgccgcggctttggatgtgcccgctgttggtcacatcacggctcacgctgaacgccacgttttcaccgccgagcaacgcgccgctgccatcgagatcgcccgctttaacccgcgcgtaaacctgcggcaccagcacctgctgcacggagccatccgttagcgtgacctctctggcgaccagccagaccatatcgctggtcagcagcgccatctgcgctggcgtcagcgccaccccgaccgtcaggttgtactgtttggcgaaggcgacgcccgcgtccatcagcgcccggtactgctcttcatcgttactgtagccctgcaggtagcgcccgccgctcagcttaacgatctgctcacgcaccagccgctgttcgtaatagccgtcgccaagccgcttcatcgcctgatcaacgcccagctgattttgcatgtagtcgctggcgagccacgctttaccgttggtaaaacgcggatcggtttccaccagatagcctgctttagcctgcgggtcgatctgatacaggctgctgacaggaagccgggtatccggcgtgacgacgcgaataacctttccgtcagcgttaaccggcgtcacttccaccagccgtccggcgggtagttcgcctgtttcatcggcgcgatcgcgcggattaatcacaccgctatggccatcaatttgggtattgccctgccacttcatggtttgcaaatcgatggtctgaaccgtcggcgtcggttcatattcgctgctttttttcccctggctggttttggtgccgccaaacgggcggctggtctttttctcataccaacgggtctgggtgccgacgtcggtggtcacccgtttgccggtcgtggcgacgttgtttagttcgccaatcacgccaccgagcgctcctccggcgataatctggctatcgtagttattcagcttatcgctgttgatgatgagctggccgccggaaaggattttgccaggatcgctttccaccacctgcgtttccacaacggtacgctggtactggtattcataaaactcatcgccgcggcttccgtccggcatgatggcgtcgtgaacgccgtatttgtttttatagctggtatcgaccagcgaccagtcgaagcgctgtaccgatcctttcagcgccgcttcatggcgccatgactgctcgaccaccacatctttcgtcaccagatggtcgttgtagttattgatttgttggatatcgagcgccatatcaccggcggactcaagcgttgcgctgtggttattaaacactcccgcccggccgctgcgcgaaccgtctccggcaagctggccgccaatggcgagcgttccgtcgctgtagatcagcgcgtgatcctggttattgagcgtgccgacgcccattgccagcgatgcgcgtgcggcaatcgtcgccgccacgccgttctccgcggcgttagtcagcgttgccgcctgcagcgcaacggcgtcgccgtacaggcgcccgctgccgatattggttaacgtcgtggcgacaatatgggttaaaccaccgtcaatcagcccccgattgaccaactcgccgctgaccgtcaaatggttctcgccagcgctgatttcaccttcctgacggttatccagctttgccgcatagagattgagcgcccggccggcgctgataaccccctgattaatcagccccagcccggaaagattccactgcaggttgccgttggcgatgatcctcccggcgttatgaaacgcctgacgcaacgtgagcgacatatcgccctgagagagcacctcgccatcgccgctgagggaatcggcatcgaggctaagtttgctcgcggcaagtaacgttccgcccgtattagccaacgccaggttgacgcctgctatttccagagcggcggcggagacgatctgcccctgccggttatccagcccccggttgtggatggtaatattgagattaccgccggactgcagttctccctgccggttatcaacggtggcgctctgaatacccagggcatcaaaggcggtaattgttccctgctggttatccagcaaaccgctcgtcgtcaggttgacgctgccccgctgcgccgtgcctacctgcccgtgacgattagtaagattttcagcctggagttggatatcgccgctggcgatgatattcccctgcgagttatccaccccatggcgcgcagtgagctgaatgtcgccctgcgccgcgctgatttttccgccatggttggtcagattgtcggcgtcaagcttgatattgccatttgcggcaagaacgccttcgcggttatccagccctccttcagcgctcatggccaggtcgccctgcgccgcaatcaattgcccctgctggttccgaaggctggccacttgtagagaaaggctaccgccagcaacgatattcccttgcgaattttccagctcatgacgcgtaatgagctgagcattgccctgcgtcgtgctgattttaccactgcgattattaatgttatcggagtgcaaaacgatattgccgttagcggcaatagtgccttcgccgttgtccagcgcgccttcgctggtaatagacatgccgccgctgccggtatgcagcagcgttccgttttgattgagcaactggctggtgctgagcgccaaagcatggctgttgctggcaatctcaccgccgcggttatccaatcccgcacgaaaatcaaggcgtagatcgtcctcgcccgtctgctggattacgccctgttggttatccagcgccattgctttcagctcaagctggctggccgtcaacaggccactgtggttgttgagtttgccgctggcggccaactggagtttttcgctggccgccaccaccgcatctcggatggtgatatccccggtcgcggcgctgaccacgatccgcgccccgaggttcgactgttatcaagatccaccgtcctgccctgtgccgtcagcgttcctgccgccatattgcggccattcagcgccagcgagctctggctattcagcgtcagcgcgccgctgctggcggtagaaccatcgctatttaatccggcggcgagcgtactgttttgcgcgctacgcaaagcgttggcggcaatccgcgtatcgccttgcgcggcgatcatgccgtcattggttagcgtcgcgctggccgtcaccacgctatcttttccggcgtacagttggccctggttgtgaagatcgcccttaacggacagttgtagattctgcgcggactgaatcacgccgctgttgctgagcgcgccatcagcgctgattgctacatccccgccgccgcgccgatattgccggcattgtgaacgcctacgccgcgctcggtaccgacaagacgaattttatgggcgtacatcccgcccagcgcgctgacgtctatcgccaccgcaggcagcgcactgccgtcggctgattttgccgtcgttcggctgtgcgccgcatcgatctgattacgccctgcggtgacctttagctcctgcgcccaaaccccggcgttgattttcaccgcgcgggcgagcaggtcggtactgtctaccgagctcgcatcaaggccgccgccctgaacaataatttcgccacgattgacatcataaccactaatctgcccgttaccgtactgcacctggcctgtcgtcagcgtcgcgcggttagcattgatgaacccgcagccatcgcagctaattccggcagggttagcgatcaccacctgcgctttttgtccggcaacctcgatatagccattcagccggctcggatcgcgggtattcacctcgttgaggatcactctggcttcgcctttcgccagattctggttgccggcgactatcccggccagttgggttgaagtgttagcgtggctgttattcagcaccacgccgcgcccatcgacatcaaactggctgtagacgttgcgtgaaacgcctgcgccgctcggtgtctgaatattgacctgcggcgtgccattggcgctattagcgatctgcggttgctggccgcctggcgcatggttatcggcgactatcgccgcctgagccggagtgagacaggaaaaagcgagcagaaagctaaaggccagcggcgccagggtggacgtcagcgtcgccccggttcgcgcgtcggcgccggattgcggcgacacgcccgcccgatgagagcggatcgtttccgccaccaccattagcatcccgcgagccttattaaatacgattcgataaaagcgtttattcattgccgttactcgtcatccgttgtccaccgcggcgcggaaaatcatccctgtgcgcagcacgcgccgccggcggcgcgtgagtaaagtcagtagttccagctgacgctgaaaccaaaagtcgccgggtcggttttaaagccatcgggtttggctaaagggataccggcgaacaggtcgtagctggcgcgtaggtactggccgcgcagccctgccacgcctccggcgaggtgtttgcccaccagcgtttcactacccgcgccgccgacttcgccgtaatccgcccccagataaaactcctgccccggcagcggggtcgaccaggcgatatcgttacgtacgtaccagccgtgactggcggtcagggtgcgctcgccgtcaaagccgcgaaccgtccagcggttgccgatggaaaacatatccggcgaagtcagcggcgtgctgctcatctgccgctgatagcggctggtaaagcgaaaattttgcccgcccagggcaaaaggcaaattgagctgagcattgaattgcaggattttgctgagggcggttgcttcccccattgctcttccggcgcgggctgagcgccaaaccagcgggtaccgcgctgatagctcactccggcatcgagagtggcgttgcccaggtaatggcgatgctgcaggccaagcttccaggccgccgtctgccgccgctgaacggcaatctcggtgtcgttaatgaagttgcgctgctcgcgggctaacacatcggcgctaagagtggtcttctgactaccgctacggtgcagtacgcggctcatctggaaatcaacgttcttgcttttaccgctgtactggtaatcgccgttggcccccgccacggtttgcacgtaatcgtactggctggcggttaatccgagctgccagtagcccagcgggatcgaataatggccggtcaggttctttgaggatttaccgccattgccatcgaggttatgtgagcccgaaaggtaaaaaagatcgcttaaggctagcgggttatccagtgacagcgtcaggttcccctgataacggccagtggcattagagctggaatcatcaagcgaggcgtcaacgcgccagaagcgttcctgttggcggttaatgacaatatcgctttgacccggcgtctcgcctggaacaatttccatgctggcctgtaccgtcggcaggcgctgcagattttccagcccctgttcaatatcgcgcaaatccaacagtttcccgtcagtcgccggaaatgcgctcgccagccacagataatcatcgctgtcctccgtaagcctggcctcacggatataacccggcatcaccaccaggcgcaaaacaccgctttttaagtcctgctgcggagccaggatcctgctggtgatataaccgcgttcgattaatatatcctgcaattgggacatcaatagatttattcccttccctcccagacaacgtccaatcgctttatttgtctggcgctgaagcggaagccaatgcggtaaggcttcgatgccctgcaaaataacctgagaaatagcaaagcaaggttgttctacgggaaataaaccatcatcgacatttatttcttccgcggataaatgaatatccggtgacggcggcgcgagctgactttccaaggcttgctggcgctgctgctggttgatgaactgctgctcacgtacggtatccccaggtgcggcgtatccccacactggcagcgcagagataataaaaaccttatgaattaaactccatttattcattattttttaagccggggctatccatgtcgatgacaagcattcaatgatggcaattaaatacattcaaacgtgtataaatatcaactcatattaacaaggcaatcacagaaataataattcaacggtaaactcatcaatgatgggttatttttattggattggtgaatatatttcagtaacaaaggtaaaatgtgaagtcattatgaaatgagaataatgagtttgaattaatataatctgccgctgttatggctcatgccacaccgcaactctccgtgatctcaatcacatattttcctcatgctcacttcatagccaaccgcttaccccggctagcgaccgcttaaccccgcatataaccactcaccgatttacccaactttacgcgcgcggcgttctggcaagatcggaggcagtctagctaatcaatacctccaccaacccaaacaaaaaaccagacggcttcggccaattattaatctaattaacgccaggttttactatggataccaaaaaactactcaagcacataccctgggtgattctcggaatcatcggggcattttgcctctcagtcgtcgcgttgcgccgcggtgagcacgtcagtgcgctgtggatcgtcgtcgcgtcggtttccgtgtacctcgtcgcctaccgttattacagcttgtatatcgcgcagaaggtgatgaaacttgacccaacgcgcgcgacgccagcggtcattaataacgatggcctgaactacgtgccgaccaaccgctacgtgctgtttggccaccattttgccgccattgccggggccggcccgctggttggcccggtactggccgcgcagatgggttatctgccgggcaccctctggctgctggccggtgtggtgctggcgggtgcggtacaggacttcatggtgctgtttatctcctcgcggcgtaacggcgcctcgctgggcgagatgattaaacaggaaatggggccggtaccgggttctatcgccctgttcggctgcttcctgattatgatcatcatcctcgcggtactggcgctcatcgtggtgaaagcgctggcggaaagcccgtggggcgtctttaccgtctgctcgacggtgcctatcgccctgtttatgggtatctacatgcgcttcctgcgtccagggcgcgtgggtgaagtgtcggtgatcggtatcgtactgctggtggcatccatctggttcggcggcatcattgcccacgacccttactggggcccggcgttgacctttaaagataccaccatcacctttaccctgattggctacgcgttcatctccgcgctgctgccggtatggctgattctggcgccgcgcgattatctggccaccttcctgaaaatcggcgtgatcgtcggcctggcgctggggatcgttatcctcaacccggacctgaaaatgccggcagtgacccagtacattgatggtaccggcccgctgtggaaaggcgcgctcttcccgttcctgtttattaccatcgcctgcggcgcggtctctggcttccacgcgctgatcgcctccggcaccacgccgaagctgctggccaacgagaccgacgcccgctttatcggctacggcgcgatgctgatggaatcctttgttgcagtcatggcgctggttgcggcctcgattatcgaaccgggcctctacttcgcgatgaacaccccgccggcaggccttggcatcgtcatgcctaacctgcatgaaatgggcggtgaaaacgcggcgatgatcgcagcgcagttgaaagaagtgaccgtccacgcggcggcgaccgtcagctcctggggcttcgtaatttcaccagagcagatcctgcagacggcgaaagatatcggcgaaccttcagtcctgaaccgcgccggcggcgcaccgacgctggccgttggtatcgcccatgtgttccataaaatcatcccgatggcggatatgggcttctggtaccacttcggtatcctgtttgaagcgctgtttatcctcaccgcgctggatgcgggtacccgcgcaggccgctttatgctgcaggatctgctgggtaacttcgtgccgttcctgaaaaaaaccgactcgctggtcgccggtattatcggtaccgccggctgcgtcgggctgtggggctacctgctgtatcagggcgtggtcgacccgctgggcggcgtgaagagcctgtggccgttgttcggtatctctaaccagatgctggccgcggtggcgctggtgcttggtaccgtcgtgctggtcaaaatgcagcgcaccaaatatatctgggtcaccgttatcccggctgcgtggctgctgctgtgcaccacctgggcgctgggcctgaagctgttcagcagcaatccgcagatggaaggcttcttctttatggctcagcagtataaagagaagattgccgccggcggcgagctgagcgcacagcagatcgccaacatgaaccatatcgtggttaacaactacaccaacgccggcctgagcattctgttcctggtggtggtgtatagcatcatcttctacggcatcaaaacctggctcaatgtccgcaacaataaggtgcgtaccgacaaagagactccgtacgtgccggtaccggaaggcggcgtgaaaacctcgtcacatcattaatcctgatgccggatagcgctacgcttatccggcctacaaaaagcacattaacgtaggccggataaggcgcgagtcgctatccggctttattcgttatctggaacttacaatgtttggtaacttaggtcaggcaaaaaaatatctcggtcaggcggcgaaaatgctgatcggcattccggattacgacaactacgtcacgcatatgcaaaccaaccatccggatcagccgtacatgacttatgaagaattcttccgcgaacgccagcaggcccgctacggcggcgacggcaaaggcggcgtacgctgctgttaatggaggcaataatggcaccgattgcagtcaccctattaaccggttttctcggcgcaggaaaaaccaccctgctgcgccacatccttaatgagcagcacggtttcaaaatcgccgtgattgaaaatgaatttggcgaagtttccgttgacgatcaattgatcggcgaccgcgccacgcagattaaaaccctgaccaacggctgtatttgctgcacgcgctccaacgaactggaagatgccctgctcgatctgctcgacagccgcgatcgcggcgagattgccttcgaccgactggtgattgaatgcaccggcatggccgacccggggccgattattcagacctttttctcccacgaggtgctctgcgaacgctatctgctggacggcgtgattgccctggttgacgccgtccatgccgaccagcagatggatcggttcaccattgcccagtcgcaggtcggctacgcggaccggattctgttaaccaaaaccgatgtcgccggcgacaccgaaaagctgcgtgaacggctgacgcgcattaacgcgcgggcgccgatttataccgtcatccacggcgatatcgatttaagccagctctttaataccagcggttttatgctggaagagaaggttgtcagcgccacaccgcgctttcattttgtggcagaaaaacagaacgacgtctcgtcgattgtggtcgagctcgactatcctgttgatatcagtgaagtttcacgggtgatggaaaacctgctgctctccttcgccgagcaactgatgcgctataaaggcatgctgtggatcgacggcgagccaaatcgcctgctgttccagggcgtgcagcgcctctacagcgccgactgggatcgcccgtggggcgatgaaacgccgcacagcacgctggtgtttatcggcattcaactgccggaagaggaaatccgcgccgcgtttgccgggctccgtaaatagccgccgcaaggaagtatccctccccgatgggagagggatacttcatgatggatggtttagcggcgaacgacgaccagcttctgattcacaaactctttgataccgaggtcggaaagctcacggccaaagccggagcgcttcacgccgccaaaaggcagctccggcgcggtatccgttaaccagttgatatagaccatgccggtttcaatccccgaggccatacgcttcgcccgctcaatgtcctgactaaacaccgcgccgcccaggccgtagtgagagtcgttggcgagcgcaatcgcctcatcatcgtctttcaccacgtatatctgcgccaccgggccaaagaactcttcgaagtacgccgggttctcacgggttattcccgtcagaatagtgggttcgtagaaattaccttcgccggaaaccggcttgccgccgaggtgtaatttggcgccatgcttcaccgcctcgtcgacctgtttacttaaggtttccagcgcctctttcgacgagagcggaccaagggtagtgctttcatcgagcggatcgccgatcttcacctggcggaaggcatcgctaaacttgctcaggaacgactcggcgattttttcatgcagaatgaagcgtttagcggcggtgcaaacctgcccggcgttgttcagccgcgcctgtacgcctattttcaccgcgcgttccagatcggcatcgtcgagtaccacaaacacatcattgccgcccagctccagcgtcgctttcttgatatgtttcgccgcctgcgatgccacgatcccccctgctttttccgagccggtcagcgccaccccctgcacccgatcgtcagcgatgactttcgccacctgatcctgggagataaacaggttggtccacgccccttccggcgcgccagcctcgcgcaccagatgcgcgaaggtctcggcgcattgcggaacgatgctggcatgtttagcaataaccggattaccggccgccaaatttggcgccagcacgcgcattaactgataataggggaagttccacggctccaccgccattaagacgccgatgggatggtgttcaacccaggcttcgccaagctcggagggatacttcaccggcgccagaaaccgttcggcgttgtcggcgtaatagcgggcgatctgcgcgcaaagtttgacctcgccgcggctctgtttaatgagcttgcccatctcctggctggcgattttcgccagctcctccgcccggctgtcgataagatcggcaagcttatgcagcacaggcagacgctgcgcaatatcgcctttcgcccacgcagaatgataaagcgcatctgccttctgcagcgctgcctccacgtccgcatcgctgtgtgcggggtagctcttaattagctggttattcgcaggattcactgtctgataagccatatcgcatgtctccttgttatcgctattaacgcagtcaaaaatgccgctaaggatattaagggtagtcgagatggctgacgatgcgggtaaagttaggtatatccggaatattccatgagaatggatagcaagggcgccttgagggcgccccggcataacggctttatcaatgtggtaacgtggctatctcttcggcagccagaccggtgatcttcagtacggtttcaggtgcaataccgtcggcaagcatcatcctcgcaattcgctgcgcctcggcgtgctgcccttcttgtctaccttcttgccatccttcaagccgcccttcacgtttgccttttctgcggccaacttcctgtaatctttcggcgatggtcatcaatctctccctgtgttgaggaacacgatgcgcgacttcgcgaataaaccggccgaagcggcgcgcgttgccagtttgcagcaaataattaaataacgtttttagctgcctgtcattagcgtaaccgctaagtaaaattgacgttagctgctcgacgatgcccattaaatcacgctggcgaatatgtttttgcataagttctaatagcgccacgcgtcggtgtcccacaatttcatcgtccgggataaccgtgatatccaccagcggaaagggtgatgaataaagtgccctggccaattgtgggtcggcaaacctatctagccagttaagcgaccaggggtacggcgacacggaaccatggtagaacagcataggaaccaccagcggcaaggttttatggccgccgtcgagatgacgttgcatcgccgcaatagcataacgcatcaggcgaaacgccatctgcgcatcgggtgaactttgatgctcgataactacatatatgtaaccctcgccagaagccgtttttagcgaccacagcacatccgaataccaggcccgcaggttctcctcaataaaactagccgattccagctgtaacgaattgagatcgcagatctgacgtagcgcaggcggtaaatggatcgccagaaaatcacgggcggtatcagcatgcgtaagaaactttttgaaaaccgcatcatgcggcgtagacgttgtggacctttccatgtgctcgccctgccagccaattctgctgcgactctacgctgcagattttcctctgacacctggcaaaccgcgctttcacgagccgtgccgaaagctaatttctgcgtgctgcaatcgttatccactattggcagcccactcgcaaattgacccgcgcgtacaggaagttgtgccgatttttgcatgacctcgccgtcaggttatatgcttaaccctatggaaaaacttgctgaattaaaacgcgccaaactgctggcgctgtcgctgctgctgattgcggcggcgctgtttattactacgctgctgctaccgccgacgccgtgggtcagcgcgctgaaggctatttccgaagcggcgatggtcggggcgctggccgactggtttgcggtggtggccctgtttcgccgaattccgctgccgtttgtcgcccgccatacggcgatcatcccgcgtaataaagaccgtatcgccgataatcttggccatttcgtgcaggagaagtttcttgatactccctcactggtggcgctgatccgccgctacgaaccggccttgatgctcggtaactggtttagccagcccgaaaacgcccgccgggtcggccagcatttactacaggtcatgagtggttttctcgaactcaccgacgacacccgcattcagcgcctgctacggcgcgcggtgcacaaggctatcgataaggtcgacctgacgcagaccagcgccatgatgctggaggggctaacccgcgacaatcgtcatcaaaagctgttggattcactaataagccagctgatcgccctgctacagcgcgacagctcacgcgcctttatcgcccgcggtatcgtgcactggctggagaccgaacacccgctgaaggccaaactgttacccaccgagtggcttggcgagcacagcgctgaaatggtcaccgacgcggtaaatacgctgctcgatgaggtcactcaggaccgcagccaccagattcgccaggcctttgaccgcgcggcgcagaagcttatcgacaatctgaaatccgatccgcaaatggcgcaaaaagccgataacatcaaagcgtatctgaaaaacgatgagacctttaatcgctatctcggcgaggtgtgggcggatctacgcggctgggtgaaaaacgatatcagcagtgacgattcgcgcatcaagcagcggatcgccgaggctggtcagtggttcggcgaaacgctggtgcgcgacgacgcgctgcgtgaatcgctgaatgagcatctggagcaggcggcacatcgggtcgcgccggaattcgccgccttcctgactcgccatatcagcgatacggtcaaaagctgggacgcgcgcgatatgtcgcgacagatcgagctcaacatcggcaaggacctgcagtttattcgcatcaacggcacgctggttggcggcacaatcggcctcggcctgtggctgttatcgcaaattccggcgctgctgcatctgcatattggctgacaatggtagcatcataaccattctaacgatgaatacccgacggcaaggagacggctatgtcatggatttcgcgattgagcgcccgctactgcgcatcgctgttctttccgatggcgctgatcctgtacgatttttccgcctacctgaccaccgatctcatccagccggggatcctgcacgtagtgcgggattttaacgccgatgtggcgttggctccggcctcggtgagcctgtatatggccggtggaatggcgctacagtggctgctggggccgctttccgatcgtattggccgccgaccggtactgttgagcggcgcgctgatttttaccctcgcctgcttcgccactctgtggacgacctcaatgacccagttcctgattgcccgttttgtgcagggcaccagcatctgttttatcgccaccgtcggctacgtcaccgtgcaggaggcctacgatgaaaagcggtcaatcaaactgatggcggtgattacctccatcgtgctggtggcgccgatcgtcggcccgctttccggcgcggcgctgatgcattttatccattggaaagcgctgtttggcattatcgccgcgatggggctggtggcctggctgggtttactgtttaacatgccggagacggtgcgtcgcggcgacgtgccattcagcccgctcggcgtggtgcgcgattttcgcgacgtcttccgcaaccgcatctttttactcggcgccgccacgctggcgctgagctatattcctctgatgagttgggtggcggtatcgccggtcattttaatggacgccggcgggctcaccaccagcgagtttgcctggagccaggtgccggtcttcagcgcggtcattatcgctaatctgtcggtggcgcgctgggtgaaagacccgactcgcccgcgctttgtgttaagcgccgtgcccatccaaatgattggtctggcgatcctgattatcggtaatttgacgtggccacacgtctggctgtggtcggtactcggcacctgcttctacgccttcggtatcgggctgattttcccgacgctgttccgctttaccctgttttccaacgacttgccgaaaggtaccgtgtccgcctcgctgaatatcgtgatccttagcgtcagcgcgttatcgattgaaggcgcgcgctggttgtggttccatggcggcagattaccgttccacctgctggcggtggccgccgggatcgtcgccgcctgctgtctggcagggttactccgtaatttgcgccagcgttcagaggcggtcatcgaagcccggcaatcctgaataacccacagagaataaccacgcatgagcgatattgaactcagcccggcacagcgcgatctgctgcgcgagcggctaagcaagtactgcgaagagacctttaacctggagctggaacagttcgacgccgagttttttgtcgactttatcgccaaagagctggggcctttgttttacaacgccggtattgaagaagccatccgcacccatctggcatggagcgagcgtattcaggaagagatggatttgaagaaggtctattaacgccttcaggatgggcgggagatcaataaacacacacaaataacatggttataatagcgactctttcatcatctcccgtgtacggggaaggaaaatcatgtcgctcatcaccgatctacccgccctcttcgatcaattctcagaagctcgccagaaaggctttctcagcgtaatggaactcaaagagcagaacgtaccgctggtcggtacctactgcacttttatgccccaggagatagccatggcggcgggcgccgtggtcgtctcactgtgttccacttctgatgaaaccatcgaagaggcggagaaagacctgccgcgcaacctctgcccgctgattaaaagcagctacggcttcggcaaaaccgataaatgcccctacttttatttctccgatctggtggtcggcgaaaccacctgcgacggcaaaaagaagatgtacgagtacatggccgaattcaaggcggtacacgtaatgcaactgccgaacagcgccagcgacgccgcctcccgcgcgttgtggaaagcggaaatcaaacgcctgcagcagatgattgaaacccggttcgccacgcccattagcgaagcagcgctgcgtgaagccatcgtactgaaaaatcgcgaacgccgcgcgctggccaacttctatcgcctcgggcaactcaatccgccggcgcttagcggcagcgatattctaaaggtggtttatggcgccaccttccgcttcgacaaaaccgcattgattgacgaactcaatgccatggcggaaaacatccgccgacaatggcaggagggaaaacgcctggccgcacgtccacgcattctgatcaccggctgcccgatcggcggcgcggcggaaaaagtcgttcgcgctattgaagaaaacggcggctgggtggtgggctacgagaactgtaccggcgcgaaggccactgagcgctgcgtggcagaagatggcgacgtctacgacgccttaaccgataaatatctcgccatcggctgctcctgtatttcacctaacgaccagcgcctgcaattgctaagccagatgattgaggaataccaggccgacggcgtggtcgatgtcattctgcaggcttgccatacctacgccgtggaatcgctggcgattaagcgtcacgttcgccaacggcacgacattccttatatcgcgatcgagaccgattattcgacggcggatctcggccagctcagtacccgcgtcgccgcgtttatcgaaatgctataaggagcaagcgtgatctactcggtaggtattgattccggctccaccgccaccaaaggcatcctgctggcagacggcgccatcgtgcgccgtttcatcagcccgacgccctttcgccccgccgatgccattcacgaggcctgggagacgctgcgcgcggacctcgcggcaacgccttttttaaccctcaccggctatggtcgccagttggtcgatttcgccgataaacaagtcaccgagatttcctgtcacgggctcggcgcacgcctgctggcgccggaaacccgcgcggtgattgatatcggcggccaggacagcaaagtcatccagcttgatgtgcagggcaacctcagcgactttctgatgaatgacaaatgcgccgctggtaccgggcgctttctggaagtgatttcacggaccctcggcgccagcgtcgaccagttggacgccattaccgaaggtgtagaaccgcacgccatcaccagcatgtgtacggtgttcgccgagtcggaagtcatcagcctgcgttccgccggagtcgcgccggagtcaattctggccggggtgatcaacgccatggcgcggcgcagcgcgaactttattggccgtttatcggcgcagggaccgctgctgtttaccggcggcgtcagccactgcgtcgccttcgcccgcatgctggagaagcatgttggcatgccggtcgcgacccatcccgacgcccagtttgccggggcgatcggcgcggcgctgatcggtcagcgccagcggaggcgcggatgagcaaatatctattcttattccattcaacggtgggcgtcgtgcggatgcgcaaagccctgcaggcggcagcgatgaccttcgaggtgaaggatattccccgccagctgcgcagcggctgcgggttgtgcatttacctgagctgcatgccgggcgatgagcaacgatgggttgtacccggcgaaacggcagccctgtttcgcgtcgccggaaatgactatcacctgttggcgacctatgcgcaccgcggtagcccggatgaggcgttagccgacatccgggactcttccccggtagcgcttacgcgtaccggggctaccgacaaaatgcccaacagtagctcgggtaaggcgtaagcgctatccgggggctggcagcttagcctcagcccaacagctggcgaacgcaggatttgaatacccgcacgccatctgccagcgcggcgcgatcgaaatgcatctccggatgatgcaggcccggctgcaggttgcagcccagccccagaagccgcctttcaccgccgggcgcaaacgcaggtagtgaaaaaagtcctcgctacccggcgtactcttcgcggccgttaagcccgcttcaccaaaggtttcgcgaattgcctggctcacgatagccgtggcgtcttcatcgataatcgccgccggcatctctttgacgatccggatatccgcactggcgccatatgctgcggcgctgctctcaatcgctctcaccacccgctctttgagcatcgccatgccgtcattttcctcacagcgtagatcccaacagacgtgcgcgttctccggcacagaattggtgacgcccgcatcgcaaagaaaacgcgtcgctttcgcgctccaggtgagtgaaggcgccagatggatgccattcaccgcctgtaccgcatgcgaagcggcatccaacgcgtttatgcccagatgggggcgagcggcatgggcggctttgccgtggaaatcaaccatcaccgtcgcggaggcggagtagtacatcgccggaacggccttgcccatcggacactcttccagtggccggaggtggaagccaaataacatttccacgtcatccagtaccccggcctccgttaacgcaatcgcccccgtacccaactcttcggcaggctgaaataacacttttaacttgccacgttttaccagcctttcggcgaggatctcttcagcggcggttaataccaccgaggagtgaccatcatggccgcaggtatggcgggcctctaagcgcccatcgataatatggcccagcgcatccatatctgcccgcagcgccaccacaggccctggttcgccgctatcgatttcggcaacaatcccggtggtcccgccaacatggcggtgaactctgaatcccgccgcttctaaggtatcgccgatgtaagccgaagttttgtactcctcaaagcccagctcaggaatttgatgcagataattgaaatgttctaacgttcgcgacacgactgactccttgccttttattatgcaatcacgcgcatgaccaacatggcgatgacggcgttgataatgctcaccgccatcagcagcggccaatactttttcggtacatccgccaccccaagcagccgccccatatactgtagctgcgatcccatcagaaagatcgccgggatcaggatggtgatgtccgccacgttgagggtgcctttactcaacaggctgacagcaactccggtccccgccgaggcggaaagccaggaggtcagcaacacggtaatcgcttcgcccggcaggccaaacagccccatcagcggcgcgcacagctggccgattaactgcatcaccccgagcaaattaagcatttcggcaatcacatacgccattaatacattcggcatcaggttattgatggcgatattaaatcctttacgtgcgccaataacaaaaatatcaaacgggttactggcgacttttggcgaattattcattatcaaagtcccctttgtaggcggtatttaaaaccaaacgggtgattgccgcaccaacgaatttcaggacaaacattaaaagcagcggaataataataggaatggttaatgatgcaaaaagcgctgaaccaattgagaaatagttattaatcagaccggcgccggaatattgccatgccccatgatcaccacatctttacgactgatttttttactgtcatacagttctttggtcaacgcggcgccggcatcggtgctttgtagatcggtaatcagcgccaaaccggtataacccggtatccccagtaacggacgtaatagcggcgtcaacagtttatgcgccgcgcgtattgcgccgtagtgggtaaaaatttccaacaaacccagcgccaacatcaccgtcggaaccagcgatagcgcaaacaggaaaccggccttagcgctgatgccgccgctaccgatgaaagtgttggtttccggggtcttcatcgtgccaaacgcgcccccagggtggtgaagtcaaaggcccccagccaggccattccttccactttaaaaagcaacccggagaacactaataacaccacgaccagcgagacccatgctcccggcccaacccgccactcatttgtcgcgtcgttggaggaacgttccaacgttttattttcactcataccctatcctcacatcatgaaatatctgttcagttgtttgcaatttggcagctttttaatgtattgcttttggcatttatgatgttgacgcaagacagcctgaaataaataagcgacgttccttttttccgaaaagtcaccaggaagcatgctccttacttatttatcttttttgtggtatatcgatatcttatttttggtaaccaccgcgaccacggccttattagcatgatggtttacccccgcattttctccttttctattttctgcctgaataatgattatctataactagccgggatgataaatgcctggtaaagggtgttattgttgacctgaggtcaacaaaggagagtgaaagatgttgcatgaacggcccatgagctatctgtatgaagtcggtattcaaggaggtattagacgggcagccgatattctggggatcaatccgtcggttatcagccgccagatagcgcaactagagcgaacgctggaactgcccttactggagcgacaggggcgaaatgtagcgctcaccgaagccgggcgcctgctggcggaggattactgcgaaagccgtcagcgacgggaaaaactggaaagccaactaaaagatttacgtcacatgcgtggcggcaccatctctgtaaggatcggcgggggctggtcgccacttttatcgagtcggtcatgagcacctttgcgcagtcgtggccaaacgtgttcgttgatattagcgttggcaatatgcaggagatgcttaacgatatcgccaacggcgaagcggacatggcggtcgccttcggccccatcggcaacccggaacttaaacgacatagcttccagtgggggcccatttgcgcagtggtcgctgtacagcatcccatcgcgcggcagccgacggtgaccatcgatgaactgacgcaatatcgcctgatcgcgctaacagataactttggcctgcagcgccatatgaacgccatgtttaaaactgccggacggcagttccacccggcctaccgctgcaacctcttctccaccgccatgagcctgagccaggcgggtctggggatctcttttatgactgagtttgccgctcgggaagcgatagcccacggtattttgcgggctattcccatcgatcatcccattgccagcagcgcccagtgtcacttgctacgcaactcaaatcgtcgcttttcccccgccgcgcaccatatgtggcggttgctccataacgcctttcgcgacgcgcagcagggcctgacgatgtgatgtcattcactcactacaaagcgagtcggcgcgaagcagttcagtacccgatggaccagaaacaccatggtcagcgtcgccaccagcgataccgtgactgaagtgatacggtacaggtcgctgaataccagatcctgattcggatgcaggttctggccaaacataataccgatagtggtaatgctggcgaatcccacgcccgctcccactttttccatcacgtgcaggcgggcgctaaaggccagaccaagaccaatcagcggcatcatcaggatcatgtggttgctgaaatcatagataatcaactgcaccaccagaatgtacagacaagccagtacgacccccgccacacgccagatcgagctgattaccgcgccccgatagtgcatcggaaacaggatcagcaccccagccatcagcgccgatagcgaatcgctcagatcgcagatctgaaagatcacaaagataatggtcgcaaccgtgcctgaaagcagcgattcatgacggatccgcgcggcgtctttctctatgcgcggcggcggcttacgcggttcaacatccgggatcaaatagtgcagcagcgcgctcagcgccaccgccatcacgcaggcctccatattggagaacatcagcgtgtgccagttgctggtgggatagctcataaaattgagcatcgtgctctggcacaccacgcccatcgaccccagcaggaacagcggcccctggctcatgaagcgaaaacgcatcacatacaggccgaacacaactaatgtcataatcaccggccactgcgacagatagccaacgatgagcaccatttcgacacaattgaccgccgcgctgaacacaaactgccgggcgacgtggcggttgaataccggcaccagcgacatcagcatcagcggataaacgacgaaaaacacgccgtactgcacgtcgtagaaagtcgaaatactcagcgcgatggtcccggcgacggcaatgcgtaccgtctggcgaaaatcattggccgtgtagacgatattgccgtgcggggtaaagacgtgcgccagggtgttaatagacatagtgcaaccagctcaccaggtggatctgcaggccggcaaaggtgcgggcgaaggggccgtcgctattgtacaactgcaccgtagcgcgggcgccggtcggcagcggcttatccagcggttgatccagcgcgacatgaatccgcatacgctgcgcatcacgcacccagcgggtggactgctcaggctgcgacagttggccattcaccgcttcctgaccggcaagaataccggcgtcgctgctggtcacgtgcgccgggaacactttacccggcagggcatcgaagaccaccgccgcatcggtattcaccgccgtgtggcgcaggcttttttcacgaaagtcggcgacgatatcggtattgttgttgaccagcgccagcacggcggtagcggcggtggcgtaaattcccggattaagctgcaggttgctgaccataccgtcggtctcggcgcgcacctgggtccagccgaggttgagctgcgcctcttccagcgcgttgcggtatttctgcagcgtcacgttgcgcttgtcgtcgcgctcgccgcgctggatcagcaggttctgaatttgcgcattcagggcgctgaccgattgttcgctggtctgccatgtcgtgcgcaccttatccagatccgattgcgacacgttttgcatggtgctcaggcgctggtagcggtcgagagtgactttgtcattacgcgcggtgtactgcgcggtgcgcaggttggcgcgagcggcagcgatttgcgcatccagctgctggttgctcagtttggcctgttgcagggcgatttgcgccgcttcaactttattaatgaatggcgtgggatcgagctcatacagcaggtcgccctttttcacctggctattgttgtgcacgtagacgtgcgagacgtagccggagacgcgcgacgagaccggagtcaccacgcgcatcacggtggagtccggggtcagtgggatccagatatcggcaacgataaaccaggcgaatatcaccaggaaagcggcaatacttacccttacccagcgggcaaatttttgttctggcgtcatcatagtgttttagatcttgttatcttcttcgcggattatccgcaagttgcaggcgatttgatttaacgtggcgctgaaggtgtcgaggtccgcatcggggatagtttccgtcacgcgccgttgataagtctcaatgacgcggttcagcttttccaggatggtacggccttctgccgtcagcgtaagcaggcggatgcgtttgtcatatggcgatgttgaacgcagtagatacccctgcttttccagctgcgtgagggtgcgcatcagcggcggcagttcaataccctgcacttccgccagttcgcttaccgagacgttgcaccccagctgatgcagctgcatcagcaccgtccagcttgactgggtcaagccggtatcggtaatggcgctgtcgataatcgcgcgccactggcgcaccaccatcgccatgcgcatccccatcgggcggcgggcaaacagttcgtcttcggtcatgttactttcctcacttagctgtggggaaaataatacttatcagggtaagtatcaagaaacgaaggatgtagaagcatcaattgataaattttgtgaatgtaattccccggtggcgctgacgcttaccggggctacaaaacgcactttttaattgatctgatcccggcgcaacccgacatctttcagctgttcgtcgctcattcgctgcagtgttttgcgcgtttgcccacgaagccaccattttctaatcgctcgcaccagaaatacccagccgataaacggctgttttgcccgattctcatgaaattccatcctctacctcctcgccttgccagaggctttatcttcacggatccgggcccgaacaatacagattcacaaaacacttttctttaacatacagattggctaaaacgtacaccatgccccatttttgaccgccatctgtactggtttatctatctgtatggcgataattaaggatacagcatgacccgttatcaacatctggccagcctgctggctgagcgtatcgaacaagggttgtatcgccacggcgaaaagttgccgtcggtgcgcagcctaagccaggagcatggcgtcagcatcagtaccgttcagcaggcctaccagacgctggaacagcaacagctgatcgtgccgcagccgcgctccggctatttcgtcgccccgcgcaaagcccaggcgccggtgccgccgatgtcgcgcccggtacagcgcccggtggagatcacccagtgggaccaggtgttgaccatgctcgatgcgcgcaacgataaatcgatcatcaccttcggcggcggctcgccggacgtcacccaaccgagccttaagcctatctggcgcgaactgagccgggcaattcagcacaacctgagcgaagtgcttaactacgacgagctggccgggcgccgcgaactgcgcgaacagatcgcccgcctgatgctcgacggcggctcagtcgtcaccgccgacgatctgctgatcaccagcggctgccacaacgcattatcgctggcgctgctgtcggtgtgtcaccccggcgatatcgtcgccgttgaatccccctgctactacggcaccatgcagatactgcgcggcctggggctgaaagccattgagatcccaaccgatccggaatccgggatcagcatcgaggccttagagctggcgctggatcagtggccaatcaaaggggtgattctggtgcctaactgcaacaatccgttgggatacatcatgcctgacgcgcgcaaacgcgcggtgctgtctcttgcccagcgccacgatatcgtgattttcgaggatgatatttacggcgagctggcgaccgaatacccgcgcccgcgcacgattcattcatgggatatcgacggtcgggtgatactttgcagctcgtttaccaagactatcgcccccggcctgcgcatcggctggatcgcccccggccgctactacgatcgtctgctgcagatgaagtacgccgccagcggcaccaacgtcccttcaacccaactggcggcctgtaactttattcgcgaaggccattaccaccgccacgtgcggcggatgcggcagatctatcagcgtaatatggagatctatacctgctggctgcgggagtttttcccttgcggaatctgcgtcacccgaccgaaaggcggctttatgctgtgggtcgagctaccggagcaggtggatatggtctgcgtcgccaagcagctgtgtcggctgaagatccaggtcgcgcccggatcgctgttttcggcatccgggaagtatcgcaactgcttaaggatcaactgcgctctgccgccgatcgagaagcataaagaggtgatggtgaagctgggggaagcggtgaaagtggcgatggagtaagaggccgtaccggaattatccatgtgcgacggcggctcactctttcttcttcggcaagataaaatcgacgcgacgatttttcgtgcgcccggcgtcgttatcgttactcgccaccggctggctttcgcctttgccctgctcgcgcaggcgtgatggctccaccccgtgggcgatcagccatttgccgaccgcgcgggcgcgacgttgcgacaggtcgagattgtacttatcgctgcccactgaatcggtatgtccttcgatcgtcaccacgccggcaggatcgtcggcgatcagttgtgcgacctttttcagcgtcggttcggcttttttggcaatcgcatcgctatcaaaagcgaagagcacgtcgctgcgcatcgacagcgtcaccgcgtctttatcgtcgcggaaagagatatccgccgactgcttcgccagatccgccgccttactctgcaaatccagcaccgcgccgccggtatccgcggggaaacctaccagatcgagggttgtcgcttgcagatcgaggatcgtcggcggcgcatgcgccggcgactcttccgccccagcgggggagcacagcgccaggccgccgatgaacaggagtttgtacaggccgctcattgcttaacgatccgtaatggcgatgggcccgagcggctcaacgttttcaatagtcaggtagacttctttgacatcctttggcggcgccgggaagctaccgtaccacgacccaacgtacggcacgccggcgcgtgagctaaacatcacactattcggagccaacgggacgccattggaatcggtcagcagcaggtatttcttattacccaccagcagatagaaagatttggcgagagcgtctttatcaattccggtatacagggattgcccggtcaggttatcggtgaggcccttaaagcgcaccttgacggtcagaatgtccccgtggcgaaccgcttccaccacctgcgcttccgccgttcccgcactcaccatcccggtggccaacggcgcggtagtcggctcctctgccagcacgacgctcgggacaaccagcgcggtcaacagacaggaggcaacgaagtttttcattcgcttcatgttgaggtccttattctgtagggcgctgtctttgttatttattattttcaataacataggaaagtcgccgggagagtaatgccctcgaagtatagtaaaacgtcccgctatcacccctaccgcgggcaaaaacgtcggtgggatcacatttagcggttctctgcttctttctacccgctcactgcccctaaaagatataagcgccccagcggattaatccgctaaaaattgagcaatcgtatgaaatataattttcaaaaaaaagcaaaaacccagatttatatatagaaaaaaaacctgtgttataaaattaagaacaataatacctgctgggtaattatattaatattttgatttataaattatgaggtagcagtgcgcctggttgtcttaataaaataatgcctataaagtcaaaattccccaccgggaaacgctaattataaaaaacataacaacatcatttggaaaacatcatgaaaataacccgcgagcaggtagtctatgcgatgtcgcgcgacaacgcccccgtcgccacggtagtcagcggtagcgaagtcacttttgaaacctgcgactgcttctccgaccaaattacctcagccgatgccgtctttaatgaactggactggcagcgcattaacccggcgaccggccccgtctttattgaaggcgcagagccgggcgattgcttaaaagtcagcatcaaacgcatcaccctgacggctcaacaggcggtgatggtgaccgcgccgcagctcggcgtcattggcgatgaactacatgagcccacggtcaccatcgtcccaatcgtcgaggatcatgcggtcctcccggggagcgtgcgcgtgccattgaagccgatgatcggcgtcattggcgttgctccagcaggagaacccatatcctgcggcacgccggatagtcacggcggcaatatggactgcaaaatgatcgccgccggcagcacgctgtggttgccggtcaacgtgcccggcgcgctattcgggctgggcgatttgcacgccgcgatggggatggcgaagtgtctgtctgcggtctggaagtgccgggcgaagtcctcgttgagttaaccgttgttaaaaaccgtcagctacccttaccgatgctggaaaacaacgaaacgattttcaccctcgcctccgccgttaccctcgacgatgcggcagcccttgcggcacgtaatatggcccatttcatcgccgacaataccgcattaacgctggctgaggcgatcaacgtgctgagcatcgccggagacctacaaatttgccaggtcgttgatccgctgaaaacctgccgctacgcgctgccgaaaacggtcgccaaacagctctctctgtcgattgatgggggcaagcatgagcgttgaacagttcggctataaacaggagctccatcgagcgctgaccttccgcgatctgctggtttacggcatgatttttatggtacccatcgctcctttcggcgtcttcggctacgtctgggatggcgcgcagggcatggtggcgctggcttatctgatcggcatggtggcaatgtttttcaccgccatgagttactggtcgatgtcgcgcgcattcccggtttccggttcggtatacgcttacgctcagcgcggaatacaccctatcgtcggtttttttgccggctggctgatattgctggactacattctggtgccatcgctgctgtatatcgtcagcgcggcggcgctggggccaatgctgccgggtgttccgggctgggtctggattatcggctttatcgcgattaacagcctgattaacttacgcggcattacttttaccgcgcgggcgaataataccattttgattgctgaaatcgtggtgctcactatttttgtggtactgggattgattgcgctttattccggagccggagcaggccacctgacgctcgaccccttatataatgccgataaattcagcctgccgctggtgatgggcgcagtctcgattgccgtgctctctttcctcggcttcgatggtatatcgacgctgtcggaagaaaccaaaggcggcgtcgataccgtcggcaaggcctcgttaggcgccctgatgctggtgggtacgctgttcattgtccagacctggattgccgcggatctggcgcagggtatgaaatttggcagcctcgataccgcgttctacgacaccgccaatctggccggcggccaatggctgaaatacgtcaccatgtggtccacggtgatttcctgggggatcgccaacgcgctggttgcccaggcggcggtttcacgcatcttgtttgcgatggcccgcgataagcagctcccgcagctgctggcgaaggtgcatccacgcctgaaaaccccgtatgtcagtaccttatttgtcgcgctgatttcactggtttccggtctctggttctacggcgatatcgacaacctcagccggctggtgaacttcggcgcgctgatgggcttcctggtgctgcacgtggcggtgatcaaccactatctgatccgccataagtcgcgcaatctggtgatgcacctgctcttcccggtgattgggctgtgcattatcggctttgtcatttatgagatggatgttgaagccaaagtgctcggcctgagctggctggccgtcggcgtggtgtattacgccattatgcgtctggtgcttaagcgcaatgtggagctgaatctggaagggtaaacaccaccgggcgtctggctcgccgctatttgcgggccagtagcccggacaaggcgcggcaagcgccgcctccgggagcctctctatcactcgccaaaaaacaccatccccttatacggctgctcgcggcaggcggccaggcgcttagcgaggctgccgacgtgcaattccagcttgtggccgtcggggtcgaggaaatagtgcgattcgccttcgctacggtttagcttccataccgctacgccagcgacctcaagacgggcggcaaagctggcaaaatcggcctcgctgatgctaaacgcataatgggtgtagtcgctctcctccggcggagtgacgcgccgctgcggatccagcgacaggcacagccacagatcgccgcaggaaagatacgcgccgctatcccagcgcgcgtgcagcgtcatgccgagtagctgatgataaaacgccacgctcggcgccagctggctgaccgccagtgtcagatgatttaatccgctcaacatatctgttcctccggtgagatgcgctaaccatacccaatcccaccctaaaccaccattgtggcagcgaaaggacaccctgctggccgctaagaccggcaacttcgcccccggtctctttctgacgccgcgtaatagtgtatgttctcaactatcgacattgaacaacccggtaacgagatgagacgtattgagatagtactgcgggagctggagaggctgagccaggccgtgacgctggaggatttagccaggggctcgaacgccttcaccgcagagcaaatcggctttaacctcgggctggcgcgcaactcggtgagtaaagatctcaatcagctatggagtgacgggctggtgattaaaacgcgcggccgcccggtgttctttttacatcgccggacgacggaaacgctgctcgaccgtacgctgacggaaagcgaacgcgagccggcaacgctcgccgatctcctgccacagccacaagataacaatgaggctgtcgatccgttcgccatgctgatcggccacgatcgcagcctgcacgatgccgtggaaaaagggaaagccgcggtgctgtatccccacgggttgcacgtcctgctgaccggtccctccggcgtgggtaaaaccttttttgccgagctgatgcaccgctacgcctgcgagcatgccggtgaaaaacggccgccgctggtctacttcaactgcgcggaatacgcccacaacccggaactgctgtcatcgcatctctttggccaccgtcagggcgcctttaccggggcgacggaaaacaaaagcgggttgatcgagcaggccgacggcggctatctgctgctggatgaagtgcatcgcctgccctatgaagggcaggaaaagctcttctcgctgctggataaaggcgaatatcgcccgctcggcgccagcggtccggcgcgcaatatcgccgtacgtctgatctgcgccaccaccgagcccatcagttcatcgctattacgcaccttccagcgccgtattcaggtcaccatcgatctacccggtattcgccagcgttcggtagaagagcagattgagctgatcatcggctttttacagcgtgaaagccgcaagatcgaacgcacggtaagcgtagataaacccttgctgctgtggctgctgaacaagccgctggaaggcaatatcggtcagctcaaaagcgatatccagtttttatgcgcccaggcatgggcatccgggatggcggcccataacgagatgctgttgctggacagcaaactggcggacggcccgatcaacgccacgcccgagcaacgacagctggtcgatgcgctgtttaatggccgcaacctactgaatatcgacgcccgcacgctaccgcagttgaaaagcccggcagccgatgacagcgtcgaggagagcgacctgttctacagtttcctgacccgcgagtacgttaacctgcgcaacagcaacgtgccgcccgccgagacgctggcgatccttaaaaataagctcagttcgatttttgaatatggcctctatagccgcgataacgccagccatgccccgcgctatggcgatcggattgaagagcgggtggatctgctgatcggttacgttgagcaggtactcggcttcgccctgccggaaaacctggtcaacccgctgcgtaaacactttctcgctctcatcagctacgtacaacgcggcctgatcccgcagctatactcttcgagcctgatcctcgatcgctgcaaagatgaatacgataacgccactctattgtgcaagaagatcaacgatctgctgcatatccagtgtccggccaccgaggtggtctggctgtgcctgttcctcaaagagtgccgccattaccgccagcgcatcaccgccagccctgactgcggggcgatcctcattgcccatggcgccaccacggccaccagcatggcgcaatacgtcaatcgggtgctggagcgcgaattgttcaacgctatcgacatgccgttcgaacaatcggtgcacgatacgctggaaaagctgatccagttgatccacagcaaaggctggcagcggctgatcctgatggtcgacatcggatcgctggtccatttcggtagcaccatcagcaaactgttccagatcgatgtcctgctgatgccgaatatcaccctgaccagcctgctggagatcggtctcgatctcagctacgaaaccggcgacctgccgcggttggtcaatctgatgcaggaaaaaggtatcgccagccagctatgcacgccgcagcaggagaacgccggcaaggtgctggttatctcctgcattaccggcatgggcacggcggaaaaaatcaaaaaggtgctggaggagagctttggcgagctgatgtcgcaggatacccggatggtgatcctcgattacaacgaagttcgcagcccggagcgcctgcagcaggcgatcagggcgcatgaacggctggcgggtattgtcgggacattccagccggggctgcccgatatcccgtttatctcgctggaggagctgttttccgagcagggccggagctggtgctcagcctgctgacccccgatttgtccagcagtgaacgtcgtctggagatggagcgcagcgcttcacggtttatcagcgccctgaccatggaaagcattatcaaccatatttcggtgctcaatccgcagcgcatattaaaagaaatggaagggatcctgaaccagctcaggaacacgctggtcatcgcgcctaaccgccaggtgacactacgcttcctgattcactgctgctgtatggtcgagcgtatcgtgattaaccgtaaaccgttacagatggcgctggaaacgcggccggatatggacgctcaggcatttagtgtcatcaaatcggctttccatccggttgaagaggcctacgccatccgtttatccgatgccgagtacatttatatctacgaattattatttagttaacgcctgttctggcgcggctttgcggcccgccagccttttcctcttcggtagatgacacaaattgtggcacgcgccttgctcttattagtgcgtcaacgattcggcgccaggaggccactttgtcatccactgaacctaccacccagttaccccagattctgctgctgacgcacggcggctggggcacgcaactttgcgacagtctacgcatggtgaccggcgaaatcgccggcgtcagcgaaatcgcgcttatgccggtcgataccctcggcgagttttatcagcgcgtcgaagcggccgtgcaggcgatgccggcaggatcgctgatcctgaccgattttctcggcggcaccacctccaacgtcgccgcgcgcctgagcgcggattaccccatcgccgtcgtctgcgggctcaacgcctcgctgctgttggaggcgttggatctgcgcgagcagggtccgctcaccggctacgtcaatgcgctggtcgaagccggacgcagcagctgccgcgacgttgtcgcccacgtgaaccagttaacctcttaaggagcccatcatggcaaaaatcgttttatgtcgtatcgatagccgtctgatccacggtcaggttgtcaccaaatgggtcggccagtcgcaggccaatcgtatcgccgtggtcagcgacgagctggatgccgatccgtttatgaaaaatatctatttaatggccgcgccgccgaacatcaaagtcgactgttacggcaacgccagcttcgccgccgcctggaaagagaatcagctcggcgatggcaatgtgctggtgctgttcccgtcgctgtcggccgttcaggaagccgtccagttgggctttgacgtgcagacgattcaggttggcggactcggcggcgggccgaaccgcaaggccgtgttccagaacatcacccttgatgaaaaagacgtcggcatcctcggcgctctgaaagatagcggcattcaggtgttcttccagaccattccggaagataaaccacagtcactggacgacatcctgaaaaaattctaaccagttgataaaaaggtaaaaactatggataccttactctttgcgagcctgatggggttgtattactggttcgcccgattacgtttaggctataccttctccgccatgttgctgcagcccgtggtgatcgccgtattcgtcggcctgctgctgggcgatatgaaaaccgcgatgatcatcggcgcgggtatgcagctggtctatcttggagtgacctccacgcctggcggcaacgtgccgtcggacccggcgctggccgcctgtatcgccattccgatcgccgtgaaggccgggatggagcccaacctggcgatcgcgctggcgatcccgtttggcgtcatcggggtattcctcgatcagctgcgccgtacgctcaacgccgcgtgggtgcatatggccgacaaacacgccgaaagcgccaacatggcgggcatcatgcgctgcgcctttatctatccggcgctgctggggctggtgctgcgcttcccggtggtcttcgccgctaactactttggccaaagcgtagtggaaaaattcctcaaactgatgccgcactggctgacccactcctttgaaattatgggcggaatcctgccggcgctgggctttgccatcaccatcatggtgatcggcaaaaagagcctgctgccgtggtttatcggcggatttttcgcggtgctctacctgaaggtggacatcatggcgatggcgattttcggcacctgcgtcgccttcctgattaaaggcctggccaaaaatgaaggagctgcatgatgagtagcgatgtaatggaacatgaactggttgaacgcgcccgcgaaacccaggcgctgagcaaagccgatatcaccaaagcctggctgatttactggctgggagcggaggtatccagctcctacgaacgtctgcagagcctgattttctgcgcctcaatgacgcccattatcaaaaagctgtacccggaaaaagaggagcaggccgaggcgctcaaacgccacctgaacttctttaactcggagcaaactttcggctcggttatccagggtatctccatcgccatggaagagcagaaaacccgcggcgagccgatcagcgatgcttcaatcaccgggatcaaaaccggcctgatggggccgctggccgggatgggcgactcgattatctgggccgcggtgatgccgctgctgattgccattttcattcccttcgccgccagcggcagcgcgttcggcgggatcgccccgctgatcctctacccggcgatcaccatggcgataagctacggactggtgcataaaggctacaccctgggccgtgactccattatcggcctgctgcaaggggggcgaattaaggaactgatttacggcgccaacgtgctgggtctcatcatgatgggcgcgctgtcggcaagctacgtcaaaatcaccaccccgctgaaaatcagcgcgcttaaaggctcggaagtggtggtccagcagatcctcgactcgattgcccccggcctgctgccgctggcggcggtgttcgctatctatttctacttactgaaaaaagggccgcgctacaccaccattttactgtcaatcgttgctatcagcatcgtctgctcgctgttgggagtgctgtaaatcatgaacggcaatatctaccagcaactgggcttaaaacgggtgattaacgcctgcggcaaaatgaccatcctcggcgtgtccgccgtcgacccgcaagtgatgcaggccaccgcgcaggcggcgggggccttcgtcgaaatcgataaattaaccgaccgcacgggcgagttggtctccgcccacaccggcgcggaagacagctatatcacctcctgcgcctccgccggtatcgctatcgccgtcgcggcggcgatcacccgcggtgagccggaaaaggtggcgcagatgccggacagcagccagtggccgaacgagatagtgatactgcgcgggcataatgtcgattacggcgcgccaatcaccagcgccatccgcctcggcggcgggcgcattgtcgaagtcggctccagcaatctggcggcgcgctggcagttggagagcgcggtgaacgcacgcacggcggcgcttctgtatgtgaaatcgcaccactgcgtgcagaaaggcatgctcggtattgacgatttcgtgcaggttgcccgccagcataatctgccgctgatcgtcgatgccgccgccgaagaagacttgcgccagtgggttgccagcggcgcggacatggttatctacagcggggcgaaagcctttaacgccccaacctcaggctttattagcggcaagcgcacctggatcgccgcctgtaaagcccagcaccacggtatcgcacgggcgatgaaaatcggcaaagagaatatggtcggtctcgtctacgcgctggaccgttaccggacggcggcgccggcgcctgacgccgccgcgctgcgtccattcgccgaggcgatttccgcgctacccggcctgtgcgccgatatcgaacaggatgaagccggtcgcgccatctggcgcattcgggtcagcgtcgacgccaatgaactgggactcagcgcccgtgaggttgaagctcagctacgcggcggtgatatcgccatttatgcccgccgctactatctgcatgagggtcattttagccttgacccccgcacagtcggcgaaggagaaatgtcgctcatcgtcgcgcgcttacaggagattacgcagcatgcagcggattaacttttatcgccagcgagtggcgattaatgtgctggccaaggacatcgccaacgcccgggaaatccatgaagccgccgaagggcacgcggtgattggcgtactctcggcgcaatttaccagcgttgagcaaggcgttgcagaagtgcgccgctggatggcggaagtgccttctatttccgtcggtctcggcaccggcgacccggcgcagttttacaaagcggcgatgattgccgcaaagctccaccccgcccacgtcaaccagaccttcaccggcagcggctttgccgccggggcgctggcggcgaccggcggccagcaaacctttattaatgcgctggtcagccccagcggcacgcccggtgaagtacgtatctccaccggcgtgcgcagcgccaagggcatcccggcccaggtttcctgcgatgcggcggtcagaatgatgcaggatatgggcgcgcacgcggctaaatttttcccgatggggggcgaaaagtcgctggcggagctaaaagcgctcgcccaaagcgcagcagaaaacggcatgacgctgattgagcctaccgggggcatcgatctcgataactttgcgctgattctgcaaacctgcctgcaggccggcgtcgcgcaggtcatgccgcatatttatagttctattatcgatcagcaaagcggcaatacccgcccgcaagatgtccatgctctgatgaacatcgtcaaggaactggtcgattaatccccccgcgcgtgcggtgtaggccactattaccgcacgcgctaactgcctgatctgcggaaggtcgctgtcaatctgtgagcctccacgcaataaccgcatcccgccgtgcaaagcgccctctcatattgatagcgatcaagaataatcataccgtctggtcggtatgatccgggccatgaacatggaagcccagcatcgtaaaaaagatcccgtccgtttgcatcgtcaactgcttgaatcggcggcgatgattgccggccgggacggtatcgccgccctgtcgctgaacgccgtcgcccgcgaagctggcgtcagcaaaggcgggctcatgcaccactttcccaataaacaggcgctaattttcgccctgttcgcccgactgttggcgattatggaaaaagcgattagcgagctgatggccgccgataacatcgcttacggacgctttacccgcgcctatttgcgctatctgtccaacccggagctgacggatacccacgaaagccggcaactgatggtgctgtcgctggcgatgcccgacgaaccggtgctgcgaaaatgctggcgcgactggatgctggatcatctggcgcagggcgatgcgcttgataacggcccgaccggcacgctggtgcgctatgccgccgacggcatctggttatcggaactgaccgaagggcgcaccatgagcagcgaacaccgccaggcgctggtaaacgatctgacaaaaatgacgcttcccgcgtgaagcgagtagagtgaggccgcgatgcgctacaacatcaatgcccgtctcatttatgacgcaacggacggcaccctaacattaccgggcggcaatgagccggatagccagctatccattaccgccaacgcgctgctctatttttttcttcgccataccggcgttgtcagtcgcgatgaagtgttgaaaaaggtctgggacgataacggcttaacctcatccaacagcaatctcaatcaatacctgagcatgctgcgcaaaaccttccgccactacgatatcgataacattattgtcaccgtgtcgcgcggcatgctgcagctgaatcaggatctcagcatcgaacagctcgacgccgagccgccgcccgccgatgccgttctcacatgcgctacgcctgatgaagccgcccccgctgtggcgccaacgccgcccaccgtttcacgacatgcgcgcggtatgtgctggtatctggccggcggctgtctgctgctcatcgccctgctgctggtggcatttagtctcgccggcacccacaccgcccggccaatcaatctgacgctgatgagccacagccagtgcgaactgctggccagcgatgagatgctgcgttcagtttccgccacggcctacggtaagaattttgatgaggtgcgtcagcggctgaagctcagctgcaagccgggggagcgtttcgttttcttctacggcgaccggctggagactaacggcctgggccgggtatttctcgcccactgcgcgatgcacgaagacaacccatttagctattgcgataactacttttactactcctggaagccgcaatgagactcgcgccccgcacctttttcgccctctccgccctcgcgtttatcgccgccgccggttttagcgcctggcgcctgttgccggatgccaacgatggcgtgatgagttgctccaccaaagcgatcatgcgttttgaaaacatggaaaaagagaatgtgaacggcaatattcattttaattttgccgccaacggcaacggttcgatggtggtggaaggctataccgattccgccgccggctggctctacctgcagcgctacgtcaaattcagctacaccagccaacgtatctcggcaaccgaacgccactaccgcatcaaaaaatgggaatccagcgcctcatccatcgacgaatcgccgaatgtcatcttcgactacttcatgcgcgagatgtccgacagccacgatggcctgttcctcaacgcgcagaagcttaacgacaaagctatcctgctgagttctatcaactcgccgctctacatctgcacgctgaagtccggcagcacgcttaactaacccgtcccccctgaaccgccgcgaggaaaatgcgccctcgctcacgctccattatttccccctctttccacgatgctaaaagcgcacgttttgcatttagcttcgacgccaaaacatgagtatacccacaattatcacgtggctatattactaaccgctggcaagtaattagcatcttattaacattcatctcccgccgataaatagcctaaaaaagcgccatatcatcataaaaatcaatacgcataaaacagaacgaatagataaacagaagcctaaataaggctaaatcacagagtaaaaacctaaaatattcatcctcacggatttaaatttcacttctttccccattccctatagtgaaccccgaacgccgcttccgcgtgttgatgccgttacgcggacggttttcccgaataacaaaacctgttctggaggaaatcacgatgggtgatgcattggggcttatcgaaaccaaaggtctggtggcctgtattgaagcagcggacgcgatgtgtaaagccgccaacgtcgaactgatcggctatgaaaacgtcggctctggtcttgtcaccgtgatggtgaaaggcgacgtcggcgcggtaaaagcggcggtggattccggtgtggaatccgcgcagcgcatcggcgaagtggtgacctcgctggtcatcgcgcgtccacataacgacatcaacaaaatcgtcattaaacacaaggcctgaaggccaggagaacgcaaatgggtgatgcattaggtctgattgaaaccaaaggtctggtggcctgcattgaagcggcggatgcgatgtgtaaagccgccaacgtcgagcttatcggctatgaaaacgtcggctccggcctggtcaccgcgatggtgaaaggcgacgtcggcgcggtgaaagcagcggtggattccggtgtggaatcggcgcagcgcatcggcgaagtggtgacctcgctggttatcgcccgtccgcataacgacatcaacaaaatcgtctcgcattacaaaattgcggactaacggagaaacctgatgaaagaagcgcttggtcttatcgaaaccaaaggtctggtggcctgcattgaagccgcggacgcgatgtgtaaagccgccaacgtcgagcttatcggctatgaaaacgtcggttccggcctcgtcaccgcaatggtgaaaggcgacgtcggcgcggtcaacgcggcggtcgactctggcgtggaagcggcgaaacgcatcggcgaagtcgtcagctctcgcgtcattgcgcgtccacataacgacatcgaaaaaatcgcggcgcagcacaaagcatgacctgacagggcgcgccccgtctccactcttttcgtctgatgaaggatagactcatgattgaactggataacgatttgcaatcccggcagaacgcgcgggaactggtgcgcaacgccaaaaaggcgcaggcgattctggccaccttttcgcaacagcaaatcgacgccatcgtgaaaaacgtggcccaggaagcagcgcaccacgccgaagcgctggcgaaaatggccgcggaagagaccggttttggcaactggcaggacaaagtgctgaaaaaccgtttcgcctcgctgcgcgtctacgacgccatcaaagatatgaagaccgttggcatcattcatgacgacccggtaaaaaaagtgatggacgtgggcgtgccgctcggcgtgatttgcgcgctggtccctcaactaacccaacctctacggttatctacaaagcgctgatcgccctcaaggccggtaacgccattatcttctccccacatccgggcgcgcgtcagtgcagctggaaagcgattgaaatcgtcaaacgcgcggcagaagcggccggcgcgccggcaggcagcgtcgacggcatcacccagttaacgctcgaagccacctccgaactgatgcacagcaaagacgtgtcgctgatcctcgccaccggcggcgaaggcatggtgcgcgcggcctacgcttccggcaccccgaccatcagcggcggcccaggcaacggcccggcgtttatcgagcgcagcgccgatatccaccacgcggtgaaagatatcgtcaccagtaaaaccttcgataatggcgtgatttgcgcctccgagcagtcgatcatcgtcgaacgctgcatttacgacgaggtccaccgcgagctggaagcgcagggcgtctacttcatgaatgaagatgaggcggcgaaaatggcggcgctactgctgcgcccgaacggcaccatcaacccgaaagtggtcggcaaaaccgcgctgtacctcagccagatggcgggattctgcgtcccggccagcactaaagtactgattgccgaacagaccaccgtatcgccgaaaaacccctactcgcgcgaaaaactgtgcccggtactcggcctgtacgtggaagaagactggaaagccgcctgccaccgcgtggtggagctgctgaccaacgaaggactcggccatacgctggtgatccacacccgtaatcaggacgtcatccgccagttcagcctcgaaaaaccggtcaaccgcattctgattaatactccggcggcgctcggcggtatcggcgcgaccaccaacatctctccggcgctgactctcggctgcggcgcggtcggcggcggctccagctccgacaacgtcggcccgatgaacctgctcaatatccgcaaagtcggctatggcgtgcgttcgattgacgagcttcgcgcgccgggcagccgccctgagccccagccgaccatcgttactccggcgagcgatccgcagcgcagcattcttgatgacgtgcgtttcaacgccccggccagcgccgcgccagcgcgcactgcaggcaacgatgaccgtttcgccagcgcaggcgccgccagtatggaaggtgaaatcaacgaacaaaacgtggaacgcgttattcgccaggtgctggagcgcctcgctaagtaacgcactgatataaggcgataaacgatgattctcgcaaaggtaaccggccatgtcgtcgccacgcagaaatgcgatgagctacgcggcagcaacctgctgttgatcacccgcttagatgacaaacagcagccgatgaaagaccagacctgggttgccgtcgataacgtcggcgccggcatgcacgacatcgtgctggcggaagagtacttcgcgctcaataaagaccgctacaaagcgatgtcggtggtcgccattgtcgagaacgtgtttcgggacgcctaacaggagtgagtagcccaatgagtgaatttttactgaaaccgcggatttgcttcggtcaggacgccctctcggtgctgaacgaactttccgcccgcagcgtgctgctggtgaccgataaagcgatggtgaagtttggtctcgccgagcgcgtcaccgccctgttgcgccagcgcgggatcgcctggcagatgtgggacgacgtggtggcggatccggatatcgccaccgtggtgcgcggcatgaagctgatggataaccactatccggatctggttatcgcgctcggcggcggttcggtaatcgatgccgccaaagcggttattttctccctggcgcaaacccgtccgcagcctaaccgtccgcgtccatgctttgtcgctatcccaaccaccagcggtaccggctcggaagtcaccgccttttcggtggtgaaagccaacgcggaaaagctggtactggtggatgcgtcgctgctgccggatatcgccattcttgacccgtcgctggtggcttcggtgccgccggcgattaccgccgacaccggcatggacgtgctgtgtcacgcccttgaggcctacgtctcccgcgccgccagcgacttttccgacgcgctggcggagaaagtggtgcagcaggtatttcgctatctgccgacctgctggcgcagcggcgacaacctgaaggcgcgcgaaaagatgcacaacgcctcctgcatggcggggatggccttcaccaacgcctcgcttgggataacccacagcctggcccacgccctcggcggcgtcttccgcgtgccacatggccgcgccaacgccctgttgatggcgcaagtcgtcgcctggaacgccgatttcgacggtcagtgcgacacccttgcggcaacgaaatatgcccgtctggcgcatctgctggatctgccagccgcctcgccgcgccagggcgtcgccagcctgctggtcgccattcaggctttaaaagaagagatgagcatgccctccggcattagcgacaccggcattgaggcggctgaattcgaacgccgtttgccggagatggtcggccaggcgctgcgcgacagctgtacccctaccaacccacgcgcgccggacgctaacacgttaaccgagctttatcgccgggcctggtccggtcatcccgtacagggccactgataacaagatttggagaaccttacccatggcacactacagcttaacgccgcgcgtcaaagtgctggcagaccgtttacgctcgcaggcaagcaccctgtgcaccgagcacgccgcgatcctcagcgcgctggatagcgatatcgcgggcattcccgccgccgtcaaaccggctcgccgtttctatgaactgatgcgccagctgccgctgaccatcagcgccgacgaactgattgtcggtaaccagacccgtaaaccgcacggggcgattttccatgatgaaagcgccgcgcatcgcccatccgcgttccagttcctcaacctcaacagcgatctggattcaccggactacaaactggtcgtcgaaaaaggggggctggcgattaaacaccagttagaagagaaaacccgcgccctcggcagcgcggtcagccgcagcggtatggatgaagtcaacggctgtcgcgccgccatctacgcctgtgacgccctgttagcgctggcgcaaaatctggccactagcgccgaacaactggcggccgcggaaaccaatgcttatcgcaaagccgagctgctcgatagcgcggccattctgcaccacgttccggcccatccggcgcgtaatttcaaagaagcctgccaggcgttctatctgttccagctggcgctacagctggataacggcagctatgcggttaacccgcaaggggcggatatcgcgctactgccttacttccaacgcgatatcaacagcggcgcgctgaatacccagcaggcctatgaaatcgtggagtgcctgtggttcaagctggcggaactaagcgaagtccgcgccgcctgcgccattgacggctatccgatgctcgacgccatgctgcacggcgccgcttttgacaacgccgaagtgaacgaactctcggcgatgtttatcagcgcccagcgcaacctcagcgcactgaatctgccggtacgtctgtttagcggcgtacagcaggtcaaccacgcgccgttcgccgcctgcgccgacacgccggcgatggaaggcttaaccccgcgtatgcagcgcctgcgtaaccactacctgacggtgcgcccaagcgtctctatctatcgcgcgctggcctttaccgaagtggtcaaagccaaccctggcatgccgaccattctgctacgggcgaaagccttccgccacgcctgcgaaaccgcgccgattctgattcaggacgatgagctgatcgtcggccatccgtgcggcaagccgcgcgcgggcgccttctcgccggatatcgcctggcgctgggtgcgcgacgagctcgacaccatgagcacccgcccgcaggatccgtttgaaatcagcgaagcagataaaaaaaccattcgcgaagagatcgtcccgttctgggaaggccgttcgctggacgagatttgcgaagcgcaataccgtgaggccggcgtctgggccttcagcggcgagaccttcgtcagcgacctctcatatcaccagattaacggcggcggcgatacctgtccgggctacgacgtgctgttattcaccaaagggatgaacggcattaaagccgatgccgaagcgcatctggccagcctgagcatggaaaatccggaagatatcgaccgtatctactactacaaagcggcgattgaaacctgtgaaggggtggtcaactacgcccgccgcatcgccgcccacgcccgcgaactggcggctaaagagcaaaacgcccagcgccgcgccgagttgctgaccatcgccgacgtcaacgaaaacgtgccggccaatccaccgaagaccttgcaggaagcgctgcagagtatctggaccgtcgaatcactgtttgaaatcgaagagaaccagaccgggctgtcgctggggcgcgtcgaccagtactgctacccgatgttcgaagccgatatccgcgaaggccgcctgacccacgacaccgcgctggaactgctgcaggcgttcatcatcaaatgcgccgaactgatgtggatgtcgagcgagctgggagcgaaatatttcgcgggttatcagccgtttatcaacctcaccgttggcggccagaaacgtagcggcggcgatgcctgtaacgatctgacttatctgattatggacgccgtgcgcttcgtgaaggtttaccagccgtcgctggcctgccgtatccacaaccagtcgccgcagaaatacatggaaaaaatcgtcgacgtggtgaaagcgggaatgggcttcccggcctgccacttcgatgactcccacatcaagatgatgctgcgcaaaggcttcgattttgaagacgcccgcgattactgcctgatgggctgcgttgagccgcaaaaatccgggcgcatctaccagtggacctccaccggctacacccagtggcctatcgctatcgaattcgtgctcaaccgcgggcggatggtgctgttcgatagttatcaggggctggataccggcgacctgcgcgacctgcgcaccttcgacgaattcgatgcggcggtgaaacagcagatcgcccatatcgtgcgcctgtcggccatcggtaccgtcatcagccagcgcgtccaccgcgatgtggcgccgaagccgctgatgtcgctgctggtcgaaggctgcatggagagcggcaaagatgtcgccgccggcggcgcgatggtcaaccacggtccggggctgattttctccggtctggcgacctacgtcgactcgatggcggcgatccgcaagctggtgtttgaagagaagaaatacacccttgagcagatccgcgatgcgctgctggccaactttgaaggttacgaagcgttgcgccgcgactgcctgaacgcgccgaaatacggtaacgacgataactacgtcgaccagtacgcgctggatattaccgaatggaccgagaaagagtgccgtaagtacaagatgctctactcgaccctcagccacggcaccctgtctatctccaacaacacgccaatcggcgagctgaccaacgccacgccgaacggccgcctggcgtggatgccgctctccgacggcatcagcccaacccagggcgcggataaacaaggtccgacggcgattatcaagtcggtcagcaagatgaacgtggaaaccatgaacatcggcatggtgcacaacttcaagttcctcaaagggctgctggataccccggaaggacgccacggcttgattaccctgctgcgtaccgcctcgattctcggcaatggccagatgcagttcagctacgtcgataacgaagtgctgaagaaggcgcagcaggagccggagaaataccgcgacctgatcgttcgcgtcgccggctatagcgcctacttcgttgagctgtgcaaagaggtccaggacgagatcatcagccgtacggtgattgagaagttctagttctcttaaagagaattaaatgagctgtatttgagaaataaccggaagttctccgtcccgtaacgggacggagcgggaggcaagcgtgatcgcaaaacaagaattaacgggccgaattttcaatatccagaaatattcgatctatgacggcgatggcattcgcacgctggtgttttttaagggctgcaacattcgctgcccgtggtgcgccaacccggaagggctgaacagccagttccaggtgatgttctcgcacgacaaatgcattaactgcggcgactgcgtcagcgtctgtccggcgggtattcattatcgggcggaagagaacggcgaaatgaagcacttcgtcgaccgcaataaagactgcattggctgtcgcaaatgcgaagagatttgcacccagaacgcgctggacattatgggcaaggacgtcaccgttagcgagctgatggagatcatcatgcaggactacgacttctatatctcctccggcggcggcgtcaccatcggcggcggcgagatgagcctgcagaccgattttgccgtcgccttattcagcgaatgcaaaaagatgatgattaacaccgccgtcgaaacccagggcaccaccccgcttgccaactaccagaagctggcgccggtcaccgacaccttcttattcgacataaagcagattaacagcgaacaccacaaggcgatgctcggcatcggtaacgaagggatccgccgcaatctcgaatggctggtggattccggcgccaacgtcattgtgcgtatgccgcttatccgcggctacaacgactcattcgacgccattaccggcgccattgattacgtacagaagctggcgaagcgtggaaatatccgccgcatcgacatgctgccgtaccaccagttgggacgcaaaaagtacgaacgcctggatatgccctacccgatttcccaggacccgtcttattcaccggacgaactggaccggctggaaaccttcttccagcaatttgattttgatattcgcttagtccgccattaacaggagccgaccatgaaaagtttaggcgtaattgaaacgcgaggatgggtcgccgccattcaggccgtcgacgccgcctgtaaagctgcgggagtgacctgcattggctatcgcaaaccaggctccgggctggtgagcgtctgctttgaaggggagatcagcgccatccacaccgccattgaacgcggcgtggcggtggctggcgccgagcacaccgtgaagtcgctggtgattgcccgcccggagcgctgcgtggttgaagcgttaagcaacctcaaaggcaacccgccgcgcgagcaaaaaacggccgaaccggtggttatccccgccccggaacctatcgtcccccctgccgccccgaacgaaacggaagataaacatccggcgctgaagaaagggaagaagtcatgatcgacaccctggttcgcgaaaaaatcgccgcccgcctgagcgcaacggcgccggcgatcccggtggggatctccaaccgccacgtccatctcgcgcaacaggacgtcgaggcgttgttcggcaaaggctacagcctgacgctgtttaaaccgctacgccagccggggcagttcgccgcccaggagtgcgtgaccattgtcgggccgaagggctcgctgaccaacgtccgtgtcctcgggccgacccgcccggtttcgcaactggaagtgtcgcgcgccgactgcttcacgctcgggattaaggcgccagttcgtgagtccggccagttggagaatgccggtaacgcgctgctgattgggcccgctggccacgttgaactccattcgcaggtgatctgcgcctggcggcatattcacatgtcgccgcaggacgcacgccgactcaacgttagcaatggccagaaggtcagcgtgagcagcaacggcgagcgccagctgactttcgatgaagtggtggtgcgggtgcgcgatgacttcgcgctggagtttcacattgacaccgaagaagccaatgccgccgggttgaaaaacggcgcgcaggtgacgctcatcggctaacggaggctcgccatgaccgacgaacagattgaaggtttagttgcgcgagttttgcagcgcctgcgcccgccggtactggtgatggtgaccgccgctgatggctatcgcgcggctatccgccaacgcctggcgggaagcggctatccgctgcgcctcgcgcttgaggatggcctcgctgacgccgccgcgtggcgggaggtcggcgagattatcccgtcatcgacctggcaggatgccctgccgtcagcgccgtggcgggcggtactgctgccgtttctcgattatccgctggcttcagacctgctgaacggcacgctcagcagcccgctcgcccgctgcgcgcacgaggcgctgctggcgggtattccagtgctggcgctgcgctaccactgcgatccgctcagcgaactcaaccagctacgcggcgcgaaggccgacagcgcctatgccgggcatctgcaggccacgctggctcgtctggaagcctgcggcgtcttcctcggcaccatgaatgagttgctggcgacgctggacgcacccacctcgcctggcgccgccagcagcgaaccgcgccgttatctcaccgtcacagacgtggtgaataatccggcgctggcggcggccccgcacgcccagctgaccgatgcggccattgattatttaaaaaacagaaagatatgaccttacccaactatgaacctggagcttaacgatgtcttcgaaaacaaaatgctggttatggatgctgctggttatcctctccgaaacctcggcaacctcgacgttaaaaatgttcggtagcagcgaaggcagcagcaaaatgttgctgctcgtattgctgattgcgctctattgcacctgttattactcgctctcaagggcggtgaaagatatcccggtcggcctggcgtacgccacctggtccggcaccggtattctagtggtctcgacgctgggaatggcattctacggccagcacccggataccgccgccatcatcggcatggcggtgatcgccagcggcatcgttatcatgaacctgttctcgaagatgggttccgaagagagcgaagaggctgcgcccgtcacgccagtcgcctccatggataagaaaatcgccaactaacaggaaaggaacaccctatgtttaatctcggatttttatggctggcgctgtctatcggctccgaaatcaccggcacctcgatgatcaaaaaaaccaacggtttcagcaaactggcgccttcggtgctggtggtctgcgcctacggcctgtgctacttcgccctcacccgcgcgatgagcaccattccggtgggcgtagcctactcgctgtggtgcggcttcggtatcgtcggcgtgacgatctgctccatgatcctctataagcagaaaccggacctggcggccattatcgccatggcgctgattatctccggcggcgtgatcatgaacgtcttctcgaccatgtaacaacggtttgtttatcttgccgggcggcggctacgccttgcccggctcattcaccatgctgggtgagagccgtgatttacatggacatcgcctcggcatttgtcggtagcgcgattccgggcaccatcaggcccctcagaatatgacataatcagggaagtatcttttggcttaattcaatcgcttccattcactgggctccattgctccacaatgatgaaatatattaagaagagcctcgtgttgagcgctatcatcaagaaaaaactggcaaccagcgatctgcaacacctggaacaactaaaggatcggttaaaaagccgattcggcgcggcgcctggtatacacatggccggtattcctatcgcgatcagcatgatacttgctatcttttgctacgcgatgccccaggtttatgtatggatgctactctttcgctggttaggaatacctgaatacaaagtactcatgggcgttttttttgcagcgatcgtatattgcgtagtcatcatgactacaaccttactgactgctcgaggctctttaaacggatataaattacatctgattattatcacgctgacaggaataactagcattatctactttatcggttcctggttttcatttttattcggcacggtagacaattatacgccacagataacatctgctttaggtttgatgtttttctgcctgaatatcatgtggatgaattcatcatcattttaccagtcgatcgtcttgacgttacataaccgcgtatggcgtaagcaattgaaaattgaagaacagcatatgtgatcctcccagtcagaggtaccaaattcagcaaaacctgcttacgagcaggatttcagattgctgagtaatactttgtacgcaacaggtttaccccgccgtgatttcgtggcaggataaaaagatgaacagaaacgttatcgttacctacccccgtcgttggtggctgcctgcataacaggcggcacgatacacgtttccattttcaaagccgccggaaggcggctttgttattttcaggacgtctttcggctgaacagtctgataaggagtccctgatgaaccatccacaaaccatcctcaccggcgaccgcccgaccggccaactacatcttggccactacgtcggctcgctgcgccagcgcgtcgcgctgcagcacgaccaccagcagtttatcctgatcgccgacctgcaagggctcaccgataacggcagcaatccgcaaaaaatcagccaccatatcctcgaagtcatggccgattatctggccgtcggcatcgaccccaggctcaccactatttgccttcagtccgctctgcccgcgctagctgagctcagcgcgctgtatatgaatatcgtcaccgtcgctcgcgtggaacgtaatccgacggtaaaaaatgagattgcccagaagggattcgcccgctcgctgccggttggctttctcgcctatccgattagccaggccgccgatatcaccgccttcaaggccgagctggtgccggtgggcgacgatcagctaccgatgattgagcagaccaatgaaatcgtccacaaaatgaatagcctcaccggcgaaccggtgctgcgccactgcaaagcgctactcagcgaagtgagccgcctgccgggcgtcgacggtaatgctaaaatgtcgaaatcgcttggcaatacgctgacgttatcagccagtgaagaggagattcaccgcgcggtcagcgcgatgtataccgacccgacacacctgagagtcagcgatccggggcatgtcgacggcaacgtggtgttcacctatctcgacgctttccatagcgataaggcgctggttgctgagatgaaagcccactatcagcgcggcgggctgggcgatcgccagtgtaagaatgaactggaaacctgcttgcaggagctactggcgccgatccgagaacgccgggccacttacagtcaggataaaggaatgctgctggaattgttgcgccagggtagcgaacgcgcccaccagctcacgcagcagacgctgcatgaagtgaagcgcgggctggggctgccggtactgttttgagcttcagagccctgccccggtcgcgctacgcttgccggggctcggttttataccctgcctttgtgcattttcacgcagttgcgcccctcgcgtttggcggcgtacagcgcattatcggcatcgcgcaacagcaggttgtaatcgggatggccggagtgcacggcatagccaatgctggcggtgattgggatctgcgtgtcgccgccaacattaaacgccagttggctaattttcttgcgcaggcggtcgaggatggtaaacgcctccgacacgccggtctccaccagcaccagcagaaactcttccccgccgtagcggaagatatagtcgctggaacggatattatcgctgagcagttccgcgacatgtttaatcgcccggtcgccgaccatatggccccagttatcgttaatgcctttgaaatgatcgatgtcgatgatcgctaccgtcatcggcaactcatgctccatcgccagcgtcacttcatgcttcagcaccactggcaaatagcggcggttaagcaggctggttaacgcatctttgccattttgcatctgcgacaggctgctaaaaattacgcccagttggctgcctatttgctggcaatgaatatggatcccctgaatcaggttttgtgtatttttataatccatggcagaggctgatgaccgccatcctattaataagtcgtcgacctgcgaaattaatgcggcaatttcgtccatctggctatttttgttaaaatagcgcacgcatttatggcggaaccataggccaaattctgactcagataataacgtagcgttagtatttgctttattttcgctaacaatattaaaaatcgccgtattttcccaaccggaaagcgccgcctgctgtttgccatattccatcggaacattgtccatcaaactatacaggcgatatgcctcttcgtttttggtcgcccgatagtgcgataaggtataggcatggcacatcatctcaatggccatattaatcgccataatagcgtaatagatggcatcgacggcaatctggcggtcgttaacgtggcagcggatatactcgataagcccggccttaatctgccgggcgccgcgcagcaccgcctccgccgggataccgatccgcgcgtggatactgccaatctgatattgccgttccgccaacgccggcaactgcgctttgtcgctggtcagaatctccttcacccatagcgccagcgagcggctcagtcgctcctgaactaaatcataagtcaggtggcgggcaatatccggatcctgaaaaataaaatcataaaaccgggccgctaacgcttccgattgctcctctgcgatatttttaagtacctccttaacggctgacgtcaggctgtcatacagcggtagccactccttaaaaataacagagatatattttttgctttcatcgttcatgaataaagcgctcgccgggcgttagtctatttcggggttgccgatcatacatgagttgccgcaggtcaaccagacgaagaaaatcatagggatagcgtagttctcagccattacagtgaggggttcgcaattccatagtttatatatggactttggcgctaccgatgttagtatccagattataaatatgcgtgtttcatttaaggccaggattgctgatgatgaccactctaaaagcacatctaccccaccggttggcaacgtaacaggattttgcgccggacggccttatctccccttttttatcgtcccgccgggcgaaatagcgaaacgcgcaccactcagcaatatggaacagagcgagtcgcgtatggataagaacaaacgacgttgggccgggtatatcgtagttgcagcggtagtcatcgccgcagcatggtggatgttgcgcccggccgggctccctccgggcttcgccgccagtaatggccgcatcgaggcaacggaagtcgatatcgccaccaaaattgccgggcgtatcgagacaattctggtcaaagaggggcagttcgtccataaaggcgatgtgctggcgcggatggatacgcgggtactcaatgagcagcgacttgaagcggccgcgcaaatcaaagaagcgcaaagcgcggttgccgccgccaatgcgttactcgaccagcggcagagcgaaatgcgggccaccgaagcggtggtgaagcagcgccaggcggagctcgattcaaccgctaaacgccacgtccgttccagtaccctttcgcaacgaggcgccgtctccgctcagcaactggatgacgatcgcgcggccgctgaaagcgcccgcgcggcgctggaatcggcgaaagcgcaggtctctgccgcccgcgccgccattgaagccgcccgtaccagcatcattcaggccaaaacccgcgttgaagccgccgaagcgacccatcggcgaatcctcgccgatattgacgatagccaactaaaagcgccgcgcgacggccgcatccagtatcgcgttgctgaaccaggcgaagtgctggccgccgggggcgggtattgaacatggtcgacctggctgacgtctatatgacgttcttcctgccaacggaacaggcgggcctgttggcgctcggcagtgaagcgcgcttgatccttgatgccgcgccagaactggtgatcccggcaaatatcagctttgtcgccagcgtcgcgcaattcacgccaaaaacggtagaaaccagcgacgagcggctcaagctgatgttccgcgtcaaggcgcgcattccgccagagctgctggagcagcatctggaatatgtcaaaaccggcctgcctgggatggcctgggtacgactggataagcagaaaagctggcctgaagcgctgacggtgaggttgccgcaatgaaactcacgccgcaggatacttcgcccccgtcgccctgctggaaaatgttggccagcagtttggcgccaccatcgcgttgcgcgatatcaacctggcgatcccggcgcggcgtatggttggcctgattggcccggatggggtcggcaaatcaagcctgctctcgcttatcgccggggcgcgggccattgagcagggtaacgtgatggtgctcggcggcgatatgcgcgacgttcgtcaccgccagcaggtgtgtccaaaaatcgcctggatgccgcagggcctggggaaaaacctttaccatacgctatcggtctatgaaaacgtcgacttcttcgcccgcctgtttggtcatgataaagccgagcgtgaacgacgcatcaacgaactgctgcagagcaccgggctggcgccgtttcgcgatcgccccgccggtaaactctccggtggaatgaagcaaaagctcggcctgtgctgtgcgctgatccacgacccgcagctactcatccttgatgaaccgactaccggcgtcgatccgctctcccgcgcgcagttctgggatctaatcgacagcattcgccagcgccagccggaaatgagcgtgctggtcgccaccgcctacatggaagaggccgagcgcttcgactggctggtggcgatgaacgccggtgagattctggcgaccggtagcgcggcagcgctcaaaaaacagaccggcagccagaccctggaacaggcgtttatcgccctgctgccggaagcgcagcgcctggcgcataaagaagtgctcatcccgccgcgcgacagcagcgaggaagagatcgcgattgaagcgcgcggcctgactatgcgcttcggcaactttgtcgccgtcgaccacgttaactttcgtatcgcccgtggcgaaatttttggcttcctcggctctaacggctgcggcaaatccaccaccatgaagatgctcaccggcctgttgcccgctagcgaaggtgaggcctggctgttcggccagccggtcgacccgaaagatatcgccacccgccagcgagtgggttatatgtcgcaggctttctcgctctatagcgaactgagcgtacggcaaaacctggagttgcacgcccgcttgtttcacattccggaccatgaaataaccggccgggtcgcagaaatgagcaaacgctttatgctgaccgaggttgaagacgcgcttcccgccgacttgccgctggggatccgccagcgcctgtcattagcggtcgcggtaattcatcgcccggagatgctgatcctcgatgaacctacctccggcgttgacccggtggcgcgcgacatgttctggcagctgatggttgacctggcgcggcaggatcgcgtcaccatcttcatctccacccactttatgaatgaggcggaacgctgcgatcgcatctcgctgatgcacgccggcaaggtgctggccagcgatacgccgcaggcgctggttgagcaacgtggctccgccagcctcgaagaggcgtttatctcctggctgcaggaagcggcggatgccacacagccaaccgtttctgtctctacaacgcccgcgccgcctgctgtcgcatcacaccagaagcacgcgcccccacgccagtcattcagcctgcgccgcctgtttagttatagccgccgcgaagcgcttgaactgcgccgcgatccggtgcgatcgactctggcgctactggggacggtgatcctgatgtttatcatgggttatgggatcagcatggacgtcgaggatctgcgctttgccgtcctcgaccgcgatcaaactatcagcagccagaactggtcgcagaatatcgctggctcacgctactttattgagcaggcgccactgcggagttacgacgaattggatcgtcgaatgcgtaacggcgagctggcggtagcgatagaaatcccgccgaactttggtcgcgatatcgcccgcggtacgccggtgcagattggcgtgtgggtggacggcgcaatgccaaatcgcgcggaaacggtgcgcgggtacgtgcaggcgatgcatctggcctggctacaggagatggccgggcggcaaagtagcccgaatcgtgagacctcgctcatttccatcgagacccgctatcgctataacccggacgtgaagagcctgccggccatcgtcccggcggtgatcccgctgctgctgatgatgatcccggcgatgctcagcgcgctgagcgtagtgcgtgaaaaagagctcggttcgatcatcaacctgtacgtgacgccgaccacccgcagcgagttcctgctcggcaaacagctgccttacatcgtgttggggatgtttaacttctttctactatgtgctttatcggtcttcgtatttggcgtcgcgcataagggcagtttcctgaccctcaccctggcggctctgctgtatgtcaccatcgctaccgggctgggattgctgatctcgacatttatgaagagccaaatcgccgctattttcggtaccgcgattattacgctgattccggccacccagttctccgggatgatcgacccggtggcatctctggaggggccaggtcgctggatcggacaaatctacccgaccagccatttcctgaccatcgcccgcggcgccttctccaaggcgctaaatattagcgatttgtgggtttcgttcattccactattgattgcggtgcctctggtgctcgggctgagcgtgtggctgctgaaaaaacaggagggatgatgcgcggattacgcaatatttataacctcggcatcaaagagctgcgcagcctgctcggcgataaagcgatgctggcgctgattgtgtttgcttttaccgtgtcggtttactcctcggccacggtaatgcccggctctctgcacctggcgcctatcgccattgccgatatggataaatcacaactctcatcgcggatcattaacggcttttatcggccgtggtttttaacgccggagttgatcagcgccgatgaaatggatgccgggctggatgacggacgatacacattcgccatcaatattccgccaaacttccagcgcgatgtgctggccggtcgtcagccggaagtacaggtcaacgtcgacgccacgcgaatgagccaggcgtttaccggcaacggctatatccagaatattatcagcggtgaagtgaacagctttgtcgcccgctatcgcgacaacagttcgctgccggtagagctggcagtgaggatgcgctttaaccctaaccttgagcaagagcgcttcggtgcggtgatggcgattattaacaacatcaccatgctggcaattgtcctcaccggctcagcgcttatccgcgagcgagagcacggcaccattgagcacctgcttgtgatgccggtaacgccgtttgagataatgatggccaagatctggtcgatgggtctggtggtactggttgtctccgggctgtcgctactgctgatggtgcagggagttttgcaggtaccgattgaagggtcgattccgctgtttatgctgggagttgcgctcagcctgttcgccaccacctccattggcatttttatgggcacgctcgcccgctctatgccacaactggggctactgatgatcctggtgctgctgccgctgcagatgctctccggcggatccacgccacgggagagtatgccgcagctggttcaggacattatgttgaccatgccgaccacccatttcgtcagcctcgcgcaggcgatactttatcgcggcgccagctttgccatcgtctggccgcagtttttaattttgttagctatcggcggcgctttctttaccattgcgctgctacgctttcgcaagacaattggtgagatggcataaaacctgaaacgggcgctacgccgatggcttatttttgacgattcataaagcggcgtagaccccaggtgaaggccatcgccatactgaaaagaatgaataacagcacaacccaactgattgaaatgcgcagtaacgtgccgggcgtcataaacggttgaagataaaccgtgaaagagtgggcaggcgattttcccagcagttgataggcgctatcggtaagccacacgccaacccggcagaacagccagataatcgccggccagcagagcagaaccagaaaggtaaagcgctcctgaatgtaagtaacgatctggcgcagcggcggccagttaagcaggattttcatttatattctcatattgccagccgatgacctgcaacattcatcgcaaggcattccgggcagcatccatacaggcaatctaccctatttgtatatcaaatttaccgtcacttaaaccagatcaagttaacaaagtgttaatgatgtatcgcatcaataccaaaaaacgcggataacgcctgccgatcgtggaaataagcggggagaagtattcaacggcgggaataaattttcaagccaacaaatagctgatttttatggctgatagcagcgcgccattatttcaccgctgggcaatataatggcgcggaaatataagcaggtgattaatcgtagctgctgataattattttcctgtttgcatcattcggtaaattcaccgtttgggtaatcaccccatgagatgggactgccatattttgcgtgttaatgaggtaagtattttgcccacaacgctgttgagctttttcgttaatgatattggtgctgcaggtaggtgtagccacacgcccggagatcgttaatgtagcggtatcagcagcgaatgcaggcaagctcaatccataagctaatgtcagaatcccaattagcggttttttcattgaatttataaccagttaacaggatgagaaataagcgatttgctttctatttttctccctcaggagaagtgatgcgttgatgtcatcacgcaggaaagataatccatataattaataaggacaattatactgagagctattagtgtgataggtattactgatgctaacgaaccaggcggccgggccgggtattttcccgcaggcggtgcaggccggggaacgatcggcagccccggtaagcgcagcgccaccggggggtgccatcgtgtctggccacaaaacacaaaaacaaaaggcccagtcttccgactgagcctttcgttttatttgatgcctggcagttccctactctcacatggggagaccccacactaccatcggcgctacggcgtttcacttctgagttcggcatggggtcaggtgggaccaccgcgctatcgccgccaggcaaattctgttttcaacacgtcctcaggacgcatcgattaatctgtatcaggctgaaaatcgtctcaaatccgccaaaacagcttcggcgttgtaaggttaagcctcacggttcattagtatcggttagctcaacgtatcgctacgcttacacacccgacctatcaacgtcatcgtctttaacgttccttcaggagacttaaagtctcagggagaactcatctcggggcaagtttcgtgcttagatgctttcagcacttatctcttccgcatttagctaccgggcaatgccattggcatgacaacccgaacaccagtgatgcgtccactccggtcctctcgtactaggagcagccccctcaattctccagcgcccacggcagatagggaccgaactgtctcacgacgttctaaacccagctcgcgtaccactttaaatggcgaacagccatacccttgggacctacttcagccccaggatgtgatgagccgacatcgaggtgccaaacaccgccgtcgatatgaactcttgggcggtatcagcctgttatccccggagtaccttttatccgttgagcgatggcccttccattcagaaccaccggatcactatgacctgctttcgcacctgctcgcgccgtcacgctcgcagtcaagctagcttatgccattgcactaacctcctgatgtccgaccaggattagctaaccttcgtgctcctccgttactctttgggaggagaccgccccagtcaaactacccaccagacactgtccgcaaccccgatcaggggccaacgttagaacatcaaacattaaagggtggtatttcaaggttggctccacgcagactggcgtccacgcttcaaagcctcccacctatcctacacatcaaggctcaatgttcagtgtcaagctatagtaaaggttcacggggtctttccgtcttgccgcgggtacactgcatcttcacagcgagttcaatttcactgagtctcgggtggagacagcctggccatcattacgccattcgtgcaggtcggaacttacccgacaaggaatttcgctaccttaggaccgttatagttacggccgccgtttaccggggcttcgatcaagagcttctccttacggataaccccatcaattaaccttccggcaccgggcaggcgtcacaccgtatacgtccactttcgtgtttgcacagtgctgtgtttttaataaacagttgcagccagctggtatcttcgactgatttcagctccacccgcaggggcttcacctacatatcagcgtgccttctcccgaagttacggcaccattttgcctagttccttcacccgagttctctcaagcgccttggtattctctacctgaccacctgtgtcggtttggggtacgatttaatgttacctgatgcttagaggcttttcctggaagcagggcatttgttacttcagcaccgtagtgcctcgtcatcacacctcagcgttaataaggtaccggatttacctggaacctccgcctacatgcttaaaccgggacaaccgtcgcccggctaacatagccttctccgtccccccttcgcagtaacaccaagtacaggaatattaacctgtttcccatcgactacgcctttcggcctcgccttaggggtcgactcaccctgccccgattaacgttggacaggaacccttggtcttccggcgtgcgggcttttcacccgcattatcgttacttatgtcagcattcgcacttctgatacctccagcaaccctcacaggccaccttcgcaggcttacagaacgctcccctacccaacaacacatagtgtcgctgccgcagcttcggtgcacagtttagccccgttacatcttccgcgcaggccgactcgaccagtgagctattacgctttctttaaatgatggctgcttctaagccaacatcctggctgtctgtgccttcccacatcgtttcccacttaactgtgactttgggaccttagctggcggtctgggttgtttccctcttcacgacggacgttagcacccgccgtgtgtctcccgtgataacattcttcggtattcgtagtttgcatcgggttggtaagtcgggatgaccccctagccgaaacagtgctctacccccgaagatgagttcacgaggcgctacctaaatagctttcggggagaaccagctatctcccggtttgattggcctttcacccccagccacaagtcatccgctaatttttcaacattagtcggttcggtcctccagttagtgttacccaaccttcaacctgcccatggctagatcaccgggtttcgggtctatacyctgcaacttaacgcccagttaagactcggtttccctgcggctcccctatacggttaaccttgctacagaatataagtcgctgacccattatacaaaaggtacgcagtcacacccgaaggtgctcccactgcttgtacgtacacggtttcaggttctttttcactcccctcgccggggttcttttcgcctttccctcacggtactggttcactatcggtcagtcaggagtatttagccttggaggatggtccccccatattcagacaggataycacgtgtcccgccctactcttcgagttcacaacctgtgcattttggtgtacgggactatcaccctgtaccgtcggactttccagaccgttccactaacacacaagctgattcagactctgggctgctccccgttcgctcgccgctactgggggaatctcggttgatttcttttcctcggggtacttagatgtttcagttccccggttcgcctcgttaacctatgtattcagttaacgatagtgcaacgaattgcactgggtttccccattcggacatcgccggctgtaacggttcatatcaccttaccgacgcttttcgcagattagcacgtccttcatcgcctctgactgccagggcatccaccgtgtacgcttagtcgcttaacctcacaacccgaagatgtttcgtaaaacattttcgtgtcgcgaaaatttgagagactcgaacacacattaactgtgtgtcgtttcaattttcagcttgatccagatttttaaagagcaaatatctcaaacgtcacccgaagatgagttttgagatatatcggcacgcgtctttcactcacgaaccagcaagtggcgtcccctagggattcgaacccctgttaccgccgtgaaagggcggtgtcctgggcctctagacgaaggggacactgaagtctcaatcgcaagacgccttgcttctttactttcatcagacaatctgtgtgagcactacaaaggcaggttctttaaggtaaggaggtgatccaaccgcaggttcccctacggttaccttgttacgacttcaccccagtcatgaatcacaaagtggtaagcgccctcccgaaggttaagctacctacttcttttgcaacccactcccatggtgtgacgggcggtgtgtacaaggcccgggaacgtattcaccgtagcattctgatctacgattactagcgattccgacttcatggagtcgagttgcagactccaatccggactacgacatactttatgaggtccgcttgctctcgcgaggtcgcttctctttgtatatgccattgtagcacgtgtgtagccctactcgtaagggccatgatgacttgacgtcatccccaccttcctccagtttatcactggcagtctcctttgagttcccggcctaaccgctggcaacaaaggataagggttgcgctcgttgcgggacttaacccaacatttcacaacacgagctgacgacagccatgcagcacctgtctcagagttcccgaaggcaccaaagcatctctgctaagttctctggatgtcaagagtaggtaaggttcttcgcgttgcatcgaattaaaccacatgctccaccgcttgtgcgggcccccgtcaattcatttgagttttaaccttgcggccgtactccccaggcggtcgacttaacgcgttagctccggaagccacgcctcaagggcacaacctccaagtcgacatcgtttacggcgtggactaccagggtatctaatcctgtttgctccccacgctttcgcacctgagcgtcagtctttgtccagggggccgccttcgccaccggtattcctccagatctctacgcatttcaccgctacacctggaattctacccccctctacaagactctagcctgccagtttcgaatgcagttcccaggttgagcccggggatttcacatccgacttgacagaccgcctgcgtgcgctttacgcccagtaattccgattaacgcttgcaccctccgtattaccgcggctgctggcacggagttagccggtgcttcttctgcgagtaacgtcaatcaccaaggttattaaccttaatgccttcctcctcgctgaaagtactttacaacccgaaggccttcttcatacacgcggcatggctgcatcaggcttgcgcccattgtgcaatattccccactgctgcctcccgtaggagtctggaccgtgtctcagttccagtgtggctggtcatcctctcagaccagctagggatcgtcgcctaggtgagccattaccccacctactagctaatcccatctgggcacatctgatggcatgaggcccgaaggtcccccactttggtcttgcgacgttatgcggtattagctaccgtttccagtagttatcccctccatcaggcagcttcccagacattactcacccgtccgccgctcgtcacccgagagcaagctctctgtgctaccgctcgacttgcatgtgttaggcctgccgccagcgttcaatctgagccatgatcaaactcttcaatttaagtttgatgctcgtgaattaaacttcgtaatgaattacgtatgttcactcagagacttggtattcatttttcgtccgaggacgttaagaatccatgtcactttgagtgcccacacagattgtctgataaattgttaaagagcagttgcgacgcgctttagcgctctgtcgcgaggtggcgtatattacgctttcctctttcagagtcaaccctgaatttcagaatttttctcttcaaccgaaccggctgtttgtgtgaagtgattcacatctgccgtgtcagtgggagcgcattatagggagctgctgagatatagcaagccttaaaatacaaaaaacttatcaagcgctcattaattaagcttttcacgtttatccgcgttaagaccgaatcgacaaaacccagtgttcatgcggcctgcagcgcattccctactgaaactacttttttgcgaaaacgcgatttttctcgtttccccaccgccgctatcacgccaatggtgaattaagcaccactcttgacccatgacaaagcgccccgcttcgccatctttctataatcagagccgtttcttcctattggtaataacctatggcttatcaactcaacattaactggcccgagtttttagagaagtactggcaaaagcagccggtcgtattaaagaaggcgtttccgaacttcatcgaccccatcacgccagatgaactggccgggttagccatggagccggaagtcgatagccggctggtcagcctggtcaacggtaaatggcaggccagcaacggtccatttgagcattttgacggactgggcgaaagcggctggtcattgttggcccaggcggtaaaccactggcatatgccggccgctgagctggtacgaccgttccgcgtattgccggactggcgtttagacgacctgatgatctccttctccgtccctggcggcggtgtgggcccgcatatcgatcagtatgacgtctttattattcagggcatgggcagtcgccgctggcgcgtgggcgataagctgccgatgcgtcagttctgtccgcatccggcactactgcacgtcgatccgttcccaccgatcattgatgaagatctggagccgggcgacatcctctatattccaccgggattcccgcacgacggcgtgacccacgaaacggcgctaaactactctgtcggcttccgcgggccaaacggccgcgacctgatcagcagcttcgccgactatgtgctggaaaacgacctcggcggcgaacactacagcgatccggacctcacctgccgcgaccatccgggccgggttgaagagtatgaactcgaacgtctgcgcaacatgatgatcgacatggttcgccaacccgaagacttcaagcagtggttcggcagtttcgtcaccacgccgcgtcacgaactggatattgctccggcagaaccggcatatgaagaagaggaagtggtcgatgcgctgctgggcggcgaaaagctttctcgtctgagcggcttgcgcgttctgcatatcggcgacagcttcttcgtacatagcgaacagctggataccaccgatgccgaagcgctggatgcattgtgccgctatacctcattaggtcaagaagagctcggcagcggcctgcaaaatccagcattcgtacgcgagctgacgcggctgattaatcagggctactggtacttcgaagagtaagagagtcgcgatattacgggcagccgcctggcgctgcccgctatctctcagacattatccaggcaactcgccccatcacctccaccactgattagagagctggaatttgttggcgatgcgcttttgcttccgcctgatgggcaaacgcctggccattattcagcgattcatgaaataccgcagcctgttcatgttcattcatttgtgaaaaagaacgcggctgtttcggggaggcaggattgtcgcccacctgcgcaagatgcccctgcgccatctgctgatgggccggcgactgcccgttgttcatcatctcatgcgccaacgccgcgttgtgatgggtcatttccgcagcattcgccacacttgctgcaaaaataacgctgatagccacgatagtgcgtactgtgttcattctattactccctgcagattaacaaatagtgagtcatcaacaggaaggataaaataatggctctgtcgccagcgtgaccgcattatgacgaagtcgtcagatgaggtcgttattgcgcatattttggtaataccacaataaaacgcgtagagcgcgaatcggactgcaccgccacgctgccgtggtgggcgctgacaatcgattttacaatcgccagaccgatgccgctgccctcgcctttgcgctggcgcgagggatcgacgcgatagaaacgatcaaacaggcgcggcagatgctcggcggcaatcggcgcgccggggttctccaccaccaggcgaatcttctcggcgctttcgctcaactgaatggtcaccgcctgcccggccggcgtatagcgaatcgcgttcgacagtaggttgctgattgcccgccgcagcatcagcgggtcgccaatcacccgacagtggctaccgacaaaacgcagcgccacctctttttcttccgcccacgcttcaaagaactcaaacaccttattcacttcctcggccagatccagcgcccgttgttcggggatcagttggttattgtccgcctgggcgaggaacagcatatcgctgaccattcgcgacatgcgcgagaactcttcgagattggaatagagcacctcttccagctcctgctggctgcggctctggcttaaggcgatttcggtttgcgttaccaggttggtaatcggcgtacggatttcatgagcgatatcggcggaaaagttcgactggcgggtaaagacatcctctatgcgctccagcatatggttaaacgacagcgccagccgttccagctcaatgggcaccgcctgcgggttaaggcgcacatcgagatcccgcgaggtaatattctggatctggcggctgatctggcgaatcggcttatgcccctgatagaccacaaacagcacgatggcgataatcagcaggctgattatcgatgccgcggaaatcagcttcgctttgagttcattaatatagtgcaggtgaaaatcgatcgataaggccatcagtagatgccaggccggtttaccgtccgcctgtttgcccagcggcaacatgatcaaccgccaggagcgtgtctccatttgatgattatcatgaaccatttcccgcggctgcgggtcagtccatgaaatcacgttaccgtcacgcaacttcatcgccagccccggcgtgctcataatatggctgagttccgggccgtctggcgactgaaataaaatattgccctcggcatcatccagacagataaagacgttagcgtagccgccaatcacgttttttaagatctccagccgccgctcctgcggatagtcggcgtggttgagcaccgtctcaagcgtggtgctgagctgcttgagatcgtgaacatcgcgctcttcaaagtgggccttcaccgaatggatcatgatccaggtgaaggcaaagaaagcaatgatggtggcgaggctaataaagaaggtcagccgggtggccaacgaaaaggggcgcttagcggccatccggcacctcaagcatatagccgacgccgcgcacggtctggataagcttcggttcgaagtcgttatcgattttggcgcgcagccgcttcaccgccacgtcgatagcgttagtgtcgctgtcgaaattcatatcccacacctgcgacgcgatcagcgaacggggtagcacctcgccctgatggcgcaagaagaactccagcagggtaaactctttgctggtcagggtgatacgagtcgcgccacgcgtcactttgcggctgaccaaatcaacgctgagatcggccgcctgaaactggctttctactattaccgccgccccgcgacgcagcagagtgcgcacccgcgccagcagttccgcaaaagcaaagggcttcaccagatagtcgtcggcgcccagctccagccccttcacccgatgctcgatagtgccaagtgcggtgagcagcaggattggcatgcctttattggcggcgcgcagcatgcgcacgatatcccagccgttgacgtccggcagcatgatgtcgaggatcagcagatcgtagtcgctggtcatcgccaggtgataaccgttaaggccgttgtcggccaggtcgacgacgaatccggcttcggtaagccctttggtcaggtactccccggttttcttctcatcttcgacaatcaaaatcttcacggctggctccttcacgcgcgctctgtgcgggtattcaattttagaggagcccctctggatagcaatgaaatatcaggaaaatgacagctttgtcattttcctgtcacgcgttgaacagagcccgctgcgtaaagtatccgccattgataaatcgccgaaaaaccgtctgccgccatgcgcccaataaagcttcttactctcagcgtgatattcgccttaaccggctgtctgtcacttgctccggactaccagcgccccgcagcgccggtgccgcagcagttctctctcagccagaacaaactggttaccgcgacggcaggctaccaggagaccggttggcgcacttttttcgtcgacccgcaggtgaaaagcctgattagtaccgcgctgaccaacaatcgcgatctacggatggcgacgctgaaagtgcaggaagcccgcgcccagtaccgggtgaccgacgccgaccgctacccgcagcttaacggcgacggcagcaccacttatggcggcaagctcaaaggcgacaccaccaccagcagcgattatgccgccggcttgaatctcagctacgacctcgacttctttggccggttgaaaaaccttagcgaggccgaccggcagaacttcttcgccagcgaagaggcgcggcgcgcggtgcatatcctgttgattgctaacgtttcacaaagctacttcaaccagcggctggcggcagcgcagctgcaggtggcgaacgacaccttacagaactatcagcagtcttacgccttcgttgaaaaacagctgctgaccggcagcgccaccgtgctggcgctggaacaggcgcgcggaatgatcgaaagcacccgcgccgatatcgccaaacggcagggccagttggcgcaggccaataacgccctgcagctactgcttggcagctatcaacggctaccggacgatagcgccagcagcgcggtggacctgaaaggcgtaaccctgccgacatcgctctcctcagagatcctgctgcagcggccggatattctggaagccgaacatagcctgctggcgacaaacgccaatatcggcgccgcgcgggcggccttcttcccgtcaattaccctgaccagctcgctctccggcagcagcagcgagctctccagcctgtttaacgccggcagcgcgatgtggaacttcatccccaaaattgaactgccgattttcaacgccgggcgtaatcaggccaacctcgatctggcggagatccgccagcagcagcaggtagtcaactatgaacaaaaaatccagtccgcctttaaagaggtggccgacgcgctcgccctgcgccagagcctggccgatcagattgccgcccaggagcgctatctcgattcactaaatatcaccctgcagcgcgccaccgcgctctatcgccacggcgcggtcagctacatcgaagtcctgagcgcccagcgtgacatttttaccacccgacaaaccctgctggaactcaactattcccgtcaggcgaatgaaatcaccctgttcaccgccctcggcggcggctggatggaataacccgaggagtcttgattatgaattcactgtctaaaatcgccctgttcacgctgttatccggtgtgatgttcactgcccaggccgccgaaccgcacgccggcatggcgatgcatgaacaacccgctgccgcgcagacgcaaagcatcactggcaaaggcgtcattaaagccattgatatggatagcaaaaaaatcactatcgcccacgacgccatcccggcggtgaactggccgccgatgaccatgcgcttcaccatcaccccgcagacgcagctcaacaatgtgaaggatggcgacagcgtggatttcaccttcgttcagcagggcaatctgtcgttgttacaggatatccgcgcccaataacggcccggcgacggtagccccctcaacaactgaatggacgacacatggcatccctgacactgaaaaatacggcgctgatccttggcagcatggtgattggcggcgcgcttaccgcggcgctgtacgcccgactgacgccgacccacgctgccgctccggcggccgagcagcagcgtaaagtgctgttctggtacgacccgatgtacccgaatactcgctttgataaaccgggtaaatcgccgtttatggatatggatctggtgccgaaatacgctgatgaggagagtgccgtcgccggtgcgccaggggtgcgtatcgacccgacgcagacccaaaacctcggcgtaaaaaccgccgtggtcacccgcgggccgctgcgctacgcccagaccttcccggccaacatcagctataacgagtaccagtacgtgattatgcaggcgcgggcggcgggctttatcaataaagtctatccgctgaccgtcggcgacaaagtgaaacaaggcacgcccttactcgagctgaccatcccggactgggtggaagcgcagagcgaatatctgttgttgcaggaaaccggcggcaccgccacgcaggttgaggggatcctcgaacgtctgcgccttgccgggatgccggatgacgatatccgccgcctgaaaaccacgcgcaaaatccagacccgctttaccctcaaagcaccgatcgatggcgttattaccgccttcgatctgcgcgccggaatgaatatcgccaaagataatgtggtggcgaaaatccagggcatggacccggtgtgggtcagcgtggcggtgccggaatccatcgcctggctaattaaagacgcctcgcagttcgccattcaggttcccgcctggccgggcaaaaccttcagcatcaacaaatggaccattctccccagcgtcgatagcgccacccgtaccctgcagctgcgcctgcaggtcaacaacccggatgaagcgctgaagccggggatgaacgcctatctgaaactgaccagcgaaagcgccccaatgttgctgatcccatcaaaagcgttgatcgacagcggtagcgagcagcgggtgattaccgtggataacgagggccgcttcgtgccgaagctcgtacaggtattccatgaatccgccggcgttacggccattcgcagcggtctacaagagggtgagaaggtggtcgccagcggcctgttcctgatcgactcggaagccaatatctccggcgcgctggagcgcatgcgcgcgaaggctcctgatgtcacggctcctgccgcccacgcgcactgaggaacggaacaatgattgaatggattatccgccgctcggtggccaaccgcttcctggtgatgatggcggcgctgtttctcagcatctgggggacctggaccatcatccacaccccggtagacgctctgccggacctctctgatgtacaggtgatcgtcaaaaccagctatccggggcaggcgccgcagatcgtcgaaaaccaggtcacctggccgctgaccaccaccatgctgtcagtccccggcgccaaaacggtgcgcggcttctcgcagtttggcgactcctacgtgtatgtgatttttgaagacggcaccgatccttactgggcgcgctcgcgggtgctggagtatctcaaccaggtgcagggcaaactgcccgccggggtcagcgccgaaatgggcccggacgccaccggcgttggctgggtcttcgagtacgcgctggtcgaccgcagcggcaaacatgacctcgccgaactgcgctcgttgcaggactggttcttaaaatatgagctaaaaaccattcctaacgtctcggaggttgcttcggtgggcggcgtggtcaaggagtaccagattgtcgtcgacccgatgaagctgacccagtacggcatcagcctcagtgaagtgaaatcggcgctggacgcctctaaccaggaggcgggcggctcttccgtcgaactggcggaagccgaatatatggtgcgcgccagcggctatttgcaaacgctcgacgacttcaaaaatatcgtactgaagaccggtgacaacggcgtgccggtctatctcggcgacgtcgcgcgggtgcagattggcccggagatgcgccgcggtatcgccgagcttaacggcgaaggcgaagtggccggcggcgtggtgatcctgcgctccggcaagaatgcccgcgaggtgatctcggcggtcaaagagaagctggcgtcactgcaaagcagcctgccggaaggggttgaagtggttaccacctacgaccgcagccagcttatcgaccgcgccatcgacaacctcagctacaagctgctggaagagtttatcgttgtcgcgctggtctgcgccctgttcctgtggcacgtgcgctcggcgctagtggcgattatctcgctgccgctcggcctgtgcttcgctttattatgatgcatttccaggggctcaacgccaacatcatgtcgctgggcgggatcgccattgcggtgggggcgatggtcgatgccgccatcgtgatgattgagaacgcccataagcggctggaagagtgggaacatcagcacccgggagagaagctaagcaacgacatccgctggaaaatcattaccgatgcgtcggtggaggtcggcccggcactgtttatcagcctgctgatcattaccctgtcgtttatcccgattttcactctcgaaggccaggagggcaaactgttcggtccgctggccttcaccaaaacctggtcgatggccggggcggcgctgctggcgatcgtggtgatcccgatcctgatgggcttctggatccgcggcaagatcccagcggagaacagcaacccgctgaaccgctttttgatccgcatttatcacccgctgctgctgaaggtactgcactggccgaaaactaccctgatgatcgcgctgctgtcgatcctgacggtgatttggccgcttaaccgggtcggcggcgagtttctgccgcagatcaacgaaggcgatctgctgtatatgccgtcaacgctgccggggatctccgctgcgcaggcagcggatatgctacaaaagaccgataagctgatcatgacggtgccggaagtagcacgggtgttcggcaaaaccggcaaggccgaaaccgccaccgactcggcgccgctggagatggtagagaccacgattcaacttaagccacaggaccagtggcggccggggatgaccatggagaagatcgtcgaggagctggataaaaccgtgcgtctgccggggctggcgaacctgtgggtgccgccgatccgcaaccgcatcgacatgctctccaccggcatcaagagcccgatcggcattaaagtttccggcaccaatctggccgatatcgacaccatcgccgaacaaattgaagtggtggcacgcaccgtgccgggagtcacttcggcattagccgagcggctggtcggcgggcgctacctcaacattgatattcagcgtgagaaggcggcccgttacggcatgaccgtcggcgacgtgcagttgtttgtttcgtccgccatcggcggcgcgatggtcggcgaaacggtagagggcgtcgagcgctatccgatcaacatccgctacccgcagagctatcgcgacagcccggagaccctccgccagctgccgatcctcacgccgctgaagcagcagatcgtgctcggcgacgtcgccggggttaaagtcgttaccgggccatcgatgctgaagaccgagaacgcccgcccgaccagttggatctacatcgacgcccgcgaccgcgacatggtgtcggtggtacgcgatctgcagcaggccatcggcaaagaagtgaagctgaaaccgggtatcagcgtctcctactccgggcagtttgagctactcgagcgcgccaatcagaagctgaagctgatggtgccgatgacgctaatgattatcttcgtgctgctgtaccttgcgttccgccgcttcggcgaggcgttgctgattatcaccagcgtgccgttcgccctcgtcggcgggatctggttcctctactggatgggattccatctgtcggtggccaccggtaccggctttatcgccctcgccggggtggcggcggagtttggcgtggtgatgctgatgtatctgcgccacgccatcgaggcggagccatcgctggagaacccgcagaccttcagcgccgataagctcgatgaagcgctgtatcagggcgcggtactgcgcgtgcggccaaaggcgatgaccgtggcggtgattatcgccggcctgctgccgattttatggggcaccggcgccgggtcagaagtaatgagccgtatcgccgcgccgatgattggcgggatgatcaccgcgccgctgttgtcgctgtttatcattccggcggcatataagctgatgtggctgtatcggcatcggggcaagcgcggagaataaataaaggcaagcccgttggtattttaccagcgggccttttaattattagacccacaagtcattccctcatttaaccaacatccacactcatattatctcatcctctgcgccaatcggccttcaccccacgttattccctttagcttcattgattttcctgctcaccctggttgcgtatttatcacgcggagaaaaggtgggccttaattcactgagcgctatcgatgaacctgaatccttttccaccctgtttatttttgctgttattactttccaccctgagcacgatatcacccagccatgcctcgacagcaaaggtggataattgcgaggttggctgcccaaccggcggcagccaacagacgctcttccgcgcggcctacacgctgaacaacaaccctcaccgtaaactggccaactgggtagcgtataaaatcactcgcgccagcgaggccagcaaccgggagagagtgtggaagcaggaccccgatttacccgccgccgataccctgacgccagccgactatcgtcgggcgaacaccttactggcggtcgatcgcggccatcaggcgccgctggcgagcctcggcggcgcggcggactggcctgcgctgaactatctgtcgaatatcactccgcaggaagcggcgctgaatcagggagcatgggcgcgtctggaagacgcagagcgcgcgttagcagagcgcccggaggtgacggcggtttatgcagttaccgggccgctgttcgaacggcatatcgccaccctgcccgccgcgccgggcgtggagatccccagcggctactggaagattatattcctcgatagcggcccgcagagcggccagtacgcggcatttgtgctggaccaggcgacgccgcgcaatgctaatttttgcgactatcaggtgacggtggaagagatcgagcgccgcaccagtccgcatttgacgctgtggtcggcactgccggcctctgtttctacatcgctaaagactctgccggggacgctggcgcgggagatgggttgcaggtagggaacggaggggtaaagttgtcgacctgtcgcgattaacaatcggcgtcttaccgccagccagcaaaccaggtatagttgccgtctctgccaccgctaagcgctgttgatatcgtatgaagctcggttatttttgttacttcctgctggcccttgccgccgtcggcagcctgttgctgccctattccatcgccatgtggttcctgctggcgaacgtgctgacctggcttatctacggcatcgacaaattagccgcccgtaaagcctggagccggatcccggaatccaccctgctgacgttcggcctgcttggcggatggcccggcgcgattgccgggcagcagtgttttcgccacaaaacccagaagcagccattcagaacgtatttcattattagcatcgtgctgaatgttgtggtgctggttggcgggtattggctgtatcggggatatggggtgtagggttggtgacctgcccgctagtggtggatctctttttaaccactaatgtcgaagacgcgcagcaggatatccctatggaggagggcccctatgccaccctgcttaaaaaaatagccaagcttcaggaacgactaccgatccgcgttgagtattctcccgtccgtatcgcgctggtgacggccagaaacagcccatcagaaatgcgcgtcattaagacattgagaagctgggggtatatgtcgacgaggcgttttttcttggtggtgtagagaaaacgaaagtcctgaaggcctttaaaccgcatattttctttgatgaccaggatgtacatttggttgctgctgcaaaagttgttccttctggtaaggttccttatgctagcaattccgagctttttaaaaaggaagcattgtaaaaattgacaacaaatagccacccagcagcaaagatggctatttgtctatttttactgtcttcctacagttcttagcgtatgacggctaaataacccgattaatacttgccttactgattggcttgtagtgaccgctcctgccgattcagttgcgatagtccctgtagcaggtattattttgcgtacagcattccaaatttgaatttttgcctgagcattttgctccatggccgcaatctctttcgagggcttcatgactaacactaacttttctcaaacggctgcgtttatctggtcggtggccgatctattgcgcggtgatttcaaacagtctcagtacgggcgcgtgatcctgccttttacgctgctgcgtcgtcttgagtgtgtgttggcggagaccaaagatgcggtggtggcgaaatatgatgaattaaaaaccagcccactgccggaagatgccaaagagaagtttctgctgcgcgcaagcacgctttccttcttcaacacctcgaagatggatctgggcaaaatgggtcagaacgacatcaaagccaacctggaaagctacgtacaggcgttctcgccagatgcacgtgaaatcttcgagcacttcaaattcagcgagtttgtcggcctgctggaggatgccaacctgctgttcaaagtggtgaagaaattcgccaccaccgaccttagcccaaaagcgatttccaactatgaaatgggcctggtgtttgaagagcttatccgccgtttcgcggaaagctcaaacgagaccgccggtgagcactttaccccacgcgatatcgtgcgtctgaccacttcgctggtgtttatggaagatgatgaagccctgacgcagcccggtattatccgcaccatttatgacccgacggccgggaccggcggcttcctctcttcaggcatggaatatgtgcacgagctgaaccctaacgcggtgatgcgagcctttggccaggagctgaacccggaatcctacgcaatctgtaaagccgatatgctgatcaaaggtcaggacgtcagccgtattaagctggggaacaccctctctaacgaccagctgccgctggatcagttcgactacatgctctctaacccgccgtttggcgtggactggaagaagattgagggcgagattaacgacgaacatacgcagaaaggttttaacggtcgctttggcccgggcctgccgcgtgtttccgacggctcgctgctattcctgatgcacctgatcagcaaaatgcgcgacaaccacaatgtggatggcaccgtgagcaacggcgggcgtatcgggattatccttaatggttctccgctgttcaccggtggtgcgggtagcggtgagagcgaaattcgtcgctacattctggaagccgatttgctggaaggcattgtcgcgctgccaacagacatgttctacaacaccggcattgccacctacgtgtggatcctctccaacaagaaagcgcctgagcgtaaaggtaaagtgcagctgattgatggcaccaacctttgcggcaagatgcgtaaatcactgggttccaagcgtaacctgatgggcgaagacgatatcaagctgatcaccaagaccttcggtgactttgaagtggtggatgccacccccctggaagaactgggtctggaaaaagccgccgagcaaaaatccagccgcgaccgtcagccagcaacggccaaaaccgaagcgacgaaaaccttcgccagcaaaatctttaacagcaccgactttggctatcgtcgcctgaccattgaacgcccgctgcggttatccgcacaggtgaccgatgaggcgattgcgacgctgcgatttgcaccgaagccgtttaacgcgccaatggaacgcctgtatgacgagttcgcatcccaatggcatgaggaaaactatggtgatttctcagagctggaagccgaagcacgcgccatcatcaaagccgaatttgccgagctgaaagagaagcagattaaagacctgctcgacagcaaactgtggctttcccagcgcgggttaatggaaaaagcgcagcaaatacagacggcactgggtacgcagacgggtggcaaaacgctggtgagcaatgatttcaaccagttccagttgaccctgaaaggggccatcaaaacggctggcgtaaagctggacgcgaaagaaaacaagcagtttatcgatgccatcaccaccaaaaacccggatgccgagccggtggtgaaaaaggtactgaaagaagcagcccaaccgctgtacggtgcatttgaatacaaaggcaaggttgttgagtttgaacaggatggtgagttacgcgataacgagaacgtgccgttgaacccgtcagtgtccaccagcgacctgattgaaaattacttcaaagcggaagtactgccgcatgtaaatgacgcatggatcaacgccgataagcgcgatgtgaaagatggcgaggtggggattgtcggttacgagatcccgtttaaccgccatttctatgtctaccagccgccgcgcccactatccgagattgatgccgatctggatgcggtcagcgccgagattatgaagctgctgcaggaggtgcattcctgatggctaagtataaggcgtatccggagtataaggattctggggttgagtggctggggagattccgaaccattggattaggtccaagtttggttatttaaagacaatattgactgattatactgccaatggttcttttgcagatttaaaatctaatgttacatatttagatgagccgtcatatgctagattagttcgcttgacagaccttaggcatgatttaaataatagcaatggagtttggattgataagaattcgtataattacttgggtaaatcatcgctttatggtggagagtttcttttagctaatgttggtgcatatgcaggattgttttatcagatgccttacaacaaaggccctgcttctttagctccaaatatgtttatggcaaagttttcccctgaaaaaacctcgagaaaatttattgcatatgttggacaagctgacaacatttctaaacagttaatgttaaaagcaaccgcatcatctgcacagccaaaattaaataaagatgattttaaatctatattttgttgttatcctccattaaatgaacagacaaaaatttctgttttcctcgatcacgaaaccgcaaaaatcgataacctgatcgagaaacaacagcaactcattgaactactgaaagaaaaacgtcaggcagtgattagccatgccgtcaccaaagggctaaaccctgatgtgccgatgaaagattctggtgttgagtggctggggaaagtgccggagcattggactatcgctcaattaaaattcaatactattgaaatgcaaactggcccatttggtagtcaattacatgctgaagattatgtggtagatggtattccattaataaatcctgcgcatatgaatgcagggatgattataccagatccgaaagttactgttgatgaagcgacccaagaaagactagggcgacataaactatcagaaggtgaaattattttctctagacgtggcgagttagggcggtgcgctgttgtaaagaaaaataacgaaggttggttatgtggtacaggtagtttgaaagctaagcttacaaaaaaaataattccagactacgcttatactctgatttcttctgagggcgttgtttcagaactgacattggaatctaaaggttcgacaatggcaaatttgaataccgagactttgggtagaattcgattgccagttcctccgattagtgagcaagaggcaatattggattatattaagataatttcagataaatatgattatctaattcgatctgcagacactgcaatcagacttatgcaggaacgccgcaccgccctgatctccgccgcagtcaccggaaaaatcgacgttcgcgactgggttgcccccgacacgcagaacgttgaggagccacaggaggccaccgcatgagcatggacagcaccaaagagctgattttccagaatgagatgattgctcagatggaggctaaaggctggatttgtggcaaaacggacggctacgatcgcgaacgtgcgctgtactcacaggatgcactgacctttgtgcagaccacacagccacaggagtgggagaagtttgccaaaatttacccgaccgataccgagcgtcatttcctcgatgcgctggtggctcagctgaaaaaagcggatatcaacgccaccgatgttttgtctcgcacttacggcacgctcggcgtactgcgtcacggcatcaaaagccataacgcacgcttttccctgtgccagtttaaaccggaacataacctcaatccggaaaccctgactcgctataaacagaatatctgccgtattgtgccagagctggtttacagcccgcatgcgtcgaatgccgcattcgaagaaacgggtaccaaggcaaagaaatggcgtatcgacctggtattgttcgtcaatggcctgccggtagcgacgctggaactgaagtctgaatttaagcagacggtgcaaaacgccattacgcaatataagaaaacgcgtttgccaaaagatcctggcaccaataaacctgagccgctgctgacttttaaacgcggcgcgctggtgcactttgccgtcagccaatacgacgtgtttatggcgaccaaactggatggcgataaaaccttcttcctaccgtttaacaaaggcacccatgacggcggcgcggggaatgatatcccggaagatgccaacgactacgccaccagctacctgtggaatgaggtgctgctgccggacaacctgctgaaaattctcgcgagcttcgtgcatctgcaaatcgtcgaaaaagaaaacgccattggcctgaagtacaaaagcgagagcctgattttcccgcgctatcaccagtgggacgtggtgaacaaactgatcaccgccgccaccgtggaagggaccggcaataaatacctgattcagcacagcgccgggtcgggtaaatcgaactctatcgcctggacggcacatcagctttcccgcctgtacgacgaaaatggcgagaagcagttccactcggtgattgtggtgacggaccgcaccgtgcttgacgaccagttgcaggacaccatctatcagtttgaacatcaggacggcgtggtcggacgtatcaataacaaagaaggcgatggttctaaatcggagaagctggcgagcgcgctggaaaactcgcagccgattatcatcgtcaccattcagaccttcccgtttgtcctgaaggcgattgaaaatagcgtcagcctcaagcagcgaaaatacgcggtgattgccgatgaagcgcactcctcacagagcggttctacggcgcgtcaactgaaagaagtgctgatgaccgaagaggcggatgacgatgtggagatgtcttcagaagatattctggacgccaccgtcgccgcgcgtaaaggcagcaacaacctcaactattatgcctttaccgccacgccgaaggccaaaacgctggagctgtttggccgtcgtcctcatccgcaggaaccagcatcgaaaaccaacaagccggaagcgttccacgtttactccatgcgtcaggccatcgaagaaggctttattctcgatgtattgaagaactacaccaactacaaagtggcgtacaagctgctgcaaaagctcgacgatcctgaccgggaagtggacagcaaaaaagccaaaatcaaactgaaccagtgggtctcgctgcacgatcataacgtgtcgcagaaggtgaaggtgattgttgagcatttccgcaagcacgtgatgcatttactggctggccaggcgaaagcgatggtggtgaccagttcgcgtaaggcggcagtgcgttacaaactggcgttcgataaatacatcgccgagcaaaaatacgacaagatcagcgcgatggtggcgttctccggggaagtggaattccacgaagatgaccacaacagccttgcgctgctcaaccagaaattcaccgagatcactatgaatccaggcctgaaaggccgggatatgcgtaaagcgtttgataccgatgactaccaggtgatgctggtggccaacaaattccagactggttttgatcagcccaagctgtgtgccatgtatgtggataaaaagctgggcggcgtggagtgtgtacagacgctgtcgcgcctgaaccgtacctatccggggaaggcgcagtccggcacctttgtgctcgatttctacaacgaacccgaagatattttgggggctttccagccgtactaccagactgcggaactgactgatgtcagcgatccacagttggtctttgagatttatgaaaaactgcgtaccagcggcattttcctgtggaacgaagtggagcagttctgcgaggcgttcttcagcaaaaataaatccaacgcggctattagcaatatttgcaaacctgcggtggagcgttggaaacatcgctacacctcggcgattgaggcgtatgtgctggccaaagagatgttcgaacgcactaaaaaaaccggcgatgttgtgctgatcaccaatgcagaaaacacctttaaggactgcgagaaagaaaaaagtaagctggatatcttcaagaaagatctcggcagctttgtccgtttttacgaatttatgtcgcaaatcgtcgattacgatgacaaggacctggaaaagctgagcctgtttgcccgccatctgcgtccgttgctgcatgaacagcgcatcgaagaagatgagattgatttaagcaacgtggagatgagccattatcgcctgtcaaagcttcacgagcagcatttgaagctacaggaagatgcggcggaatacaaaatcactccgggaaatgatgttggaacggcgaagccgaaggacaagaaagaagagtttctgtcgaatatccttgcgcgtcttaacgagctattcgttaccgataatctcaccgataaagacatgatcaattacgccttcgcggtgcgcgacaaactgtcagaaaaccaggcggtgatgacccagattgcaaacaacacgcgtgaacaggcgatgctgggtgatttcccgaaagccattgatgatgccgtgatggacagcaacgacgcccagcaggagatgatggtgcaatatctctctaaccctgagctggcgaaaggctttgcccgcgtggtgtttgatatgttgaaaggggcttaacgctttttcatcaaggagcggtgtagggaatgctgaattctttcgagatatatcaggcactgaatgaattgggttaccgacttgaggctggaaacttcgagccaagctatgcttctgaacatccgctcgggaatggaaagtatctgtatgtcaaacgcagtcgggacggcgtagttaacgagagcccattggttcttgcaccagaaacccttaccttaaaagcggaaattgatcgcattgcgggtatccactgcctttgggaaaaagtaaaaagcaccagctaccgccgttacccgaaagataatggtacgtcccaatatggttttgcggcagatgttgaatcaattgaagcgttacaggcgctggtagctttgctgggtggccaaccatctataactccccaaccgggactaaaaagagacgacaaaaacaaggagcaatcgttcatgtatcccttaaaccagattctcttcgggccacccggcacgggtaaaacctacagtaccactgaaatggcggtcaaaattgccgatgatacctggtaccaacaggctatacgggaacatcatggtaatcgcttacgggaattggtaaaagaacgctatagggcgttggtagaaaagcagcgcattatgtttaccaccttccaccagagcttctcctatgaagactttatcgaagggatccgcgcgactactgatgaaaaatcgggcacgcttcgctacgaagtggtcgatggtatttttaaacagctgtgcctgaatgctgaagttaaaacgcgtggtagttcaacccagtcattgtccttgaatgggagacggatttggaaaatgtctcttggaaatacgcttgacggtgaagattatattttcgatgaatgccttgtaaataattatattctattaggttgggggataatcttgattttagtggctgcacgacagcggctgatgtccgactgcgcatagatggagcgagtgatagtctggttgagcgaagcgaatacatgctgactgcggtcaatatgtttaaaaacatcatgaaaaatggtgacctggttattatttccgatggcaatcataaatttagggccattgccgagatcgctggcgattatcaatatctgcccaatgatgaacgcgtaggctatcatcaaatgcgtaaggtcaactggctacgaacctactcgccgagcttaccgaaagaacagctgtttttaaaagcgctttcacagatgacattatatgagttgagggacacctcaattgatcgggaaaaactgtcccaactactggccccggttgaaacaactgacaatcaagcattgccgcacgtactcatcatcgatgaaataaatcgtggtaatattgcccgcatcttcggtgaattaattactctgttggaacccgataaacgatcgggtgccgaagatgcccgtaccttaatgttaccgtattctaaacagctgttttccgtgcccagaaatgtctatgtgattggcactatgaatacggctgataagtcgttaattcaaatggatctggcgttaagacgccgctttagctttaccgaaatgcctgcacaaccggagttgctagccggggtcactgcgtttggcattgatgccgcacagttgctaacgcgtattaatcagcgtattgaagctctgctagatagtgagcatatgattggccatgcttactttatgccgctaaagaaattagaaaattccgccgaccgcgaagcctgtcttgccagcatcttccagaacaaaatcattccattactgagagagtatttctttgatgattatgaacgcattggatgggtacttaatgattcggtgaaagcgaaagaatatcgttttatcttgttacaacagtcagcacaactgccatcattttctgcactattcccgaaagatattgctgatagtttgtctgacaggcgttttcgtatcaataaacatgctttcaagtcggcagaagcttatcaggggattgtcgcatgatgatccaggtccgggaatatgccctgcttacttgtgataactctcaaccagccagtatggatttggggattgtctctgaggcaacgttttcctggcttgagcagttacaacaaacgtggagtggaacctctcacattctcagccgagaagggaagcggtttttgcgtttgggaagctatgtcggttatctacaatccccgaatggcgagtcaattgaaattctgccaaaaaccacatttgaagcgccaactgaggtagtccctctacgtcagcttttgcgccgaatgctaagcgcctctttagggattacaccccgtgaagcgaaccaggcggcattgcaatatagtgaccagcctctacatgaatggataattagtgagttcttgcggcatcttgctgatttagtgcgtaaaggacttcgtttcgactatcacctcatcgaggacgaacatagcgcgtttatccgtggtcaactgaatgtcactgcgcaaatgagaatgccgccgggccgaggcacttattttcatgtgtgttatgccgagttctctcctcagcgcatcgagaaccgtctgctacggacggctttggattgggcgcttaaaatgaccaggcaagggcaaagctggaggcaggcaaattctttaagccatcaactggatgacatagccccaatttgtgggagcacaacgcaaccaatgaggcaatggagtgacggcaaatatctcctcggctatcgcgctataaagccgtggtgccagctcattcttgaacagatgaatccagattttcaacatgggtcatatcagggtatttccctgctgttccctatggagaagttatatgaaggatgggttgggtgcggcctggctagtgcgttacatcacgattatcagctcataagacagaccaggagccagcacttgttagagcatgttccagttggtgaaaagtcatctcaacgatggttcatgcttaagccagattttattataaccggcgggcagacgttggttcttgatgctaaatggaaactattagatagcagagtcgatgacagtctgaggaaatatgaaatcagccagtcggacctgtatcagatgttcgcctatgggcaaaagtatcttcatgggaaaggaaatatgatgcttatttatccacgtcacctgtactttgatgtacctctaccggtgtttcgtttcgatgaagacttatctttatggtgtgtgccctttgatcttgaatcgggtagattagtgaaaggtgagtggcaaggttctttccactgttttccctgtgaagaggctgtaacagtctcatagcagctaaacaaataaccatgtgcttattgagtgctaaaacagcaaggggcagcaatcatgatttataaagatttttaccatttaatgttggagtctttttcccaaccagttaagctgttcaccgagtcaaggaatgtaccttttactctctatgttgaagaacaaaaactttttgttcgaaatggaaaagataataccagccgtattggccccaaagaagtcgcagcatttattgagcggtttgaagaaaatgaaagtttggctgctaaagactatcaggatgtgacattcaaagcctcctacttattggctgcaatgaaatatatcactataaaaaactcactgaatactgataataagtagtcatctttaccgctgggtggtcatttgtaaaacccacccaaacgctccctccatcactgacccatattttctatcttccccaactcaccgatttaaatcacataccaccgcctcatatttccacacgcaacaatgtaataaccagaataatatatcattgattgacttgcggagtttccatcatcaatacggcgccatacaaagaattaactcggtgatatttatgcgatttaactatacgagtttgtaatatggtatgaaatcgatatgacgaagttcagttcaccatatcaatcagcgcgttgaagttagtatatgactcaataacataatccatggatgctttaccgcggatctcgaaacaatcattagcgaagtagtaggcaaatacggacatgccattttcaccaatcaaacacgttaggattcgaactatatgactaaacctaaagaagccacaccttcctgaggtagacgccgatggttcgccagaagagtcttcatttctcgtaaaacaaactgtggcatccacctacactgcaattcaaaatcaaaccgttcgttgttggcgttcccttctggcgtcattagaccatttaaaatcagttcattataaagccattcatccaaatgtaagctgataccgtaatcactaagcagcttacaccgcaactgatgggcgatttttaagcccgctacatccagatcgccaaaataaagtagctgttttacctgttcgacctcaaggagttgtgacacgcattccgcctggccggacactttgttacctgcgccgtaaatgaccagtgaccagcgagtctgaactcgattaagttgacatagtcgataatacacatcggagttttcaacaatgatagccggaagatcatggcaacatgatgattcatacggtaaaggcggtgcacgtcgaaacgcgcccatatcagccaaagtcagagcgacatgcttccagccatcaggtggcaaggagtccagcgctttttcgtcaccaaatataagcagagaccgctcacgatgcccaagcaagcccgggaatagtgacttgtcgccctcggtttggcgaaaaagatatgtattcagctgttgtaagcgtgccttgattggctgggtcagttgtcctgtaatacgtcgagccaaccaaggatgccaggctatttctgatgttgtcttcgtaggaacgatggcaccttcgtaaacaaaagtacttggcaggctcataccccgccagtagcgctgccaactcgctttgtgcttaggctgagcccgccagtccctctcaagcaatagcgtaacagcctgactcagcaaatcaggcgcctcctggctcaaggcctcttgattgtgtgcgcgtaatacctcatccagcaccgcattagctttcactgtacgggcggccttaccaacggcaagacgatgtttagtggctgtcgactccagtcgggatagccagatcattacgctactcatctcatatcagccttaaatgacgggatcgaactgtggcttagcagccagagaagccgcccacagggcatggcgttctttatcaacggtgaccaaatcgcgccgcctcagtttttgaactttattcaggaagagatgattatcaaacattgattgggcattttcatccgaaataccagtcaggtagatgagctggattttataggctttggccatttgggtttgaattcgcattagatcatcggcattcgatttacccagcgggttatcggctaacaagaatcctgcacttgaaatacccgtatcgtattctcgtactttaccaaccgtcacaaacagtaaaaaggcagatgtaaggcgctgtccacctgaaccttcaagtcgggtgacaggagtccattgtggacggctggcattcgtcttcagcaaacgcacctccagctccccttcgccaaataccgactgaaccaaatcagctgtcaaggcatcccgattgggcgctcgaggtatctgtcccttagctatccactgctgcaagcggctgctggcaaacccctgagatcagcggcaacatcattcagccggtccgtcattttgataatgggccggccaggcagtacggggcaatcctcaggaattttgaccgacatcgcgcgcttgagaagtttaatcgccccttccagatgagcagtcagatgggtgacagtcagatcaatcgaacgctggaattgttccaggctatcctgcacagcttcgaatacctgcgtgatccctgtaccgaccctgtccaaatcgcccagcacttcatgataagttgcgattgagtccaactgccgtaagtattcctgactggcttgggcgtctggatccttggccaactcttcttcgatccgtttgcggaattttccccagaccgtagagacgcgtatattttgctgttttagcgtttcatttagaccggcatacatttggcattgtgtcgccagattgtcagcatattcagtgatgctctggatcctgccaggtagacccgccgcagaggtcggcgtaatgtgctggatcatcgcttgagctgttttggcgttctgtagccgttccttcacattttcaatcttttgcaactgcagcttcttttgctccaggtgaagttttagctggtattcaatttcatggaggctgttgacgatttcagccagagacgtttggattgtctctatctcaatgggcttctcttcccagacaaaatcctcgtcaattgctttactagcctcctcgcagctttgggaaaaattttgcagagttacctgagaattaattagattttgcgtgaattgcttctgctgttcgttgaggcgtacgatgcggttattaatgaccgttagctcattgatggccgccgcttttacctcgtccggatatgtattgtaggtggggtgagcgatcaaacgctcagaggcagaacgttgtgcctgttcagcatctttcagttgttgcttgagagcggtcacttgatcaccgctggctgcttcgagcaattttttgtgcgcctgagctgccatctcatgggcatcttcggggcttcgtcctaccataccttcagtcgccgtaatctctgaatagaacggctcgttacacagattactccagttgcccatctggatatttaaaagggttttctcggagagcttgttcttctcgatttcgttcagccgttccagtctctctttctgggtgcaaatagtgtccttgcttcgttgaatctgtgcagctaactgctccattttcattatcgccgtttcacgcttcgcccattctgtttctacaaaaaggctcagtttatcatgtgctttttctgcccgaattttctgctgtcgggcgttgtttaacctcaccagggcatctctcttctcgtcacgcagtgtttgctcatcatgctcagcttgcttaagtactgcatcagcattttccagtattaagagagcctgctcctgttggtcaagcagtcccgcccaatgcttaccatactgttcataatgcagacgccattcattactgaaatattccagtactttgaaggcgctctttgcagccttcacactgacttcctgcgacgctacgatattctccaggtcttgcagccgggcttcgtaagcagcctggctatatccatgcttatcgtggtttgagaggacgacctgtactaattcagacgtttctcggcggagatcttgtgcttcatccagcaggtaaatagcaataggtgccttcttccagggcaagatctcactaattttatggacctgttcaaacgttacattgtcgagtgcgaccaggctcaggtagcggccagggttttgatcgatcaccgcagcaatcttttgtgcatcatcgttgtaaacagaggccaaatagtgtggaaatgtccagagcttatcccgtgcaatacccgccgcataaaacgcttcaagtgcctcattgacctgctttgcgaccagttcatgtcccgtcatccttaactcgtccagttcgtgccgggcttgcagtaaacgctctttcattccattcagcgtgtgagagttagcattcaataccttgtcgagctgcaatccacacagctcgctgtgccaactcgtgtcttcaatatctagatcatgttgcattgacgttggcagtttttgataggtttttgctaaaactaaagcactatccacagctgactggtgtttttgttcagccagaatgagtttttgctgggcctcacttttctcaattgatgcctcccgcacaacattcagctgtgcttccagcgcctgctctttctgatgaagaattgtatgagccagctcttcactctgctgtgcattgcgtaaggttaattccagtcggtattgggctgctactggtgtttcatccttctggatcaacccagcttcacatagttggccccgttgcgattcgccctgccgtttgtctcttttatatctctcacgatccgcctccaggccacccagcatcttttgtagttcgtcgtatgattgtttaagggtattgctttccctatccatctgccctaattcttcctcaagcgtagcctcctgctggcgatgtctgtcgattgcccactctaatgtgcccaaggcttcgccagcagtacgctcgaaaatcacctgtagcggcctttccgtttcactttggaataccttcagatcttcatctgcctggcggtactcattcagggccttagcataggctttgtagtctatagcagcttgagtaatctcaatctggcgctgattggtatcggcttcgtcttgaagcgcatcgactatcgctttttgcttgtcgaactgatactgcacgaaatcatattcaagcagagctctgcgcttacctaactgctcacgcagagacatcgcctgaccaatatgcgtttgcaaactctccatgttatcttcaagctgcgtctgttcaacctgagcatccccgacaaaggctgcgagatcgcgcattgcttcccggaagccatcatccagcagttgctgctgcgcctggatgctttccagctgtttagccggctcaagaaacgccagccagttagccagcacatccttcaggaaggactcgttacgacggatcccctctaactctccctgacgttcaacttcatgcgctactagttcccgcagccgctcagccgcatctttagacatggtgcaggcgaaaaacgcgccaaggaaatcatgttcagttttgtattcgataaaacgggtcaggccaccttcttcggagttgaaggtcaccattgttttgataagatcaacgttaatttgttgttccagtaaaaatgcgcgccactcgttctgtctggtggttttacgccaatgcatgccgccttcactactggccttgagactaagccagctatcaaaactgcgcaggctattagcataggggcgcagctcagaattgcgttccgcgcgggaataagaagggacttcatcaaacggcgcgcccatcagggagtcgggcgcatcacaaataaacagtgtgcggtcaacatcatctccattacgctgatgagcatgtcccagtaataacgtttgtcctgattcattgaccatctcaaccaaaacaacagagagttctttatagaagtaattgcggtagtggtattcactctggcgatgatttgccagatattgggtgaagtcactaacggacggctcaaaaatcgataacagcagcgcgatgtaggttgacttaccgcccccatttacaagctgctgataagtactggtcaccaccttcgcatttctgacgggcgagcgcaggccttcaacaacagggctaccgaccgcttgagacaggccaatatagtccagtgtgaggtccttgtagaaagcttcttcatggcctgcgccatccatataaacccgtttaatcagccacatgcttaaatctccgtcaagcgttgcgtttctgtggttccagttgtaactggacgttcattgagcgaaggaaactccagggtatctgctaatgctgcaatatcgctttcagctaaatcggacgaccgttcttctacggctggactgatactcatgacaaaacgcaccgtctcttcaatgccagtatggcgcagataatgtttgagtttttgggtcggataccagtcggactctcccgacagactgctgtcttcggccagaaagccttcctcctgcagcagttgtatccagcgcgttgccatttcagtttgcgagcgaatactcgagacacgccccaccttttcgtcgtgaatacggggaatacgttcttcctgcacaaacctggccgtcataagtaggccatctacggtatcgtccccctcggccttgcgctgggcaatcacctggtcggcaacattattgagcctggctaccaccgaggcggcattaatggcattactctgaccgaactcgacacgaacggtgtctggagttggaaacaaatcagccaacaacgcaatcagtgttaagcctgcaaacaggcgctgttctttccgttccttaccctgttgctcagccattgtttcaggtagcaagcgtttgttcagccaacccaaagatggggaaaacggacctcggccatctgcagccagtaataccccgtaggtctcatgaatcccgaggtaccgcaatttcatacctgtcgccacgccacggataatctctgcgaacagggcatcaccttgcagatcaagcgcacgttgaatcagctcgtctcccatcttatatcccagtgaattcataattgcctgcgtggcaatctcggcgtagcgtttagcttgttgatgcgtgttgtcgtacataactactcctcaaaggggtgtaagggagcgacctttaacagtttgatattgtcagcccgccagagcgttgtttcgatagcgtcgtctatctctacttctattgcgggatcgctgttagctgccaggctgccaatatgaagtaaacaaacctgttgttcttgttcagataattcttcgcactcataggcgtcgaaaacatctctaaagctcacatgcccccaattcttcaatcggtcactaacccaatcgctgcattttttaatgacggattcagggatatttcgcaggttggtttcaatagctacaggctgctcggtggggtcctgtatctcatgtggaagcgcctgttcaaatctatcgagatagaggttcagcagcgcttcaggatcaaacagaatgtgccgatcatcatcctgtcttcggggagccaacaggcgtgcggtgagacgatcgatttccttttcgacagtgtcaggggaatgagacagcaagggcttgagtacacctttttccagcgtttcccggaaaagggtattatctctgggaataatgagtttcagacgagctcgctcaaaatctttgttaacatcaagtaagcagtcttgatagcgctgcgtaaaagcgcagacctcagcaaaaatctcttgtgccttacgtagcttatttaatttgtcgggatttaatttcgaacttccttcaaccagcatttcggtaatggccgacattgagttctggatatgttccaaaacctctcgggttttatcaaaggaatcattgagtacgggacggatatcgtgtgcataagatgcgctcaaatcaccagactgggcagcacgtactttcatccgcatcccaatgagatattgctccagttgccgctgcgttgattggatctggtgtactgccttgtcgatctcaccgcgacggatggttttaagcgtgcgccaggccagaatcgcagcgcgttctatcggcgtttcatccaaacggagggtatagaaaagcattccttcatcagtcagcgaccagagaatatcatctgagccggatagctgatcatagcgtaccagacggactatctgctcttcggaatgcgttcgttgcgagaagtcgtaataactgagacggaaagggtctttgatcgccgcaaaaatcttgctggcaacttgcgcgtagtcggacgcttcttgccccggataggcttcattgagatgcccaaccagacatagctcggcttctttacgcgtcataccaggctggcgctcgcggtcagcataataaagcatggcgtcaaagagatacataattgccgccagtgcatcaagcttgaagccatcaaacggattgcgctgtagggcgctgtatattgaatccagcgtccgaactacaagcaacgcgtgagattgaatcgtcagctcgcggcgtgccatagattcattacgagcctgctccaaaaaccctagtgacataacattctccctccgagacggaagtcactatagtactccccgcccaatcaagcaaagaaactttgcttaattttctttgataacaatgttatttgttttgatgacattcgccttctatacttagtccgtatatcaaaccgcaattgattaacctgcaaataagaataaaactgatatgtactactcaatgtttcttgataaacacaaatcccccctcagccacgcacaatggttgcgcttgcgctatattgaacgccagctactgtgggaacgaaaagtcacttcgcgcatgattgctgaagagtttggcgtctcggcgcaacaagctcgtactgatgtaagaacctatatggaggtcgctccaggcaacgctattgagaagggagccggccgaaaagggtatttccccagtatgacgttttcgcctgttttgcttggagacaacgatctggtctggcgtgcgacggtagaatttcaaccgccacaagcggcccacgcgcaggaaattccgctcatccatcgcgcagtacatagccgcacgctggcaatttttttgtcagcaatcgaacagaacggacaagtaaaagtgacttatgcgtcaatggaaaacccggaaggcatatcccgtacactaagcccaacggtaattattaccgttaacgggcgccagcatgtgcgagcctatgactggggtagttcggcgtttaaggactttgttttggcgcgatttctggactcgccggaactgattattcctgcccctccccctccgcgcaaagataccgcgtgggaggtcgtaatccccgtgcgttttatcgccaatccaacactaaacaaagcgcaacaagaggtaattaagcgggattacatacttgaaccatctgaattcagcattcgtgcaccaatgattttttatttatgtcctgaaaacaatctgccgaaaacagatgatgaatatgcacaagctactgacgccagcagccacggcccctttgtctaccctgttctagctgtgcacgcccaaacaagtgagcctattcataagtaccgccatgcaggtgaaaaatagacattctgtttactaataatttatagccatttacggtaactgttcctgtatcagagatatgatgcaggaatataaaacgccttccacctataaataatgatttattaatttctgattcagttaaatcccccagctctcctctatggccagaatttagcggttaattagccatgaaacagggacgttttttactgtttcaactactacccggggttaaactgtaagtatcccggcggctttcgaacctttcgggcctgcctcaggatcggcagaacggaaacccgctttcgccgatagctcagatgctgtcagccattccgagtcggccagtatccgggcttttagctcctccagttgtcggtcattgcgctcctggaagctcatatggtcaagtgcacctcccggcgattttttgaagccatacggcaccacatgcctgaaccggtttgcatccagataatccgcccaccactgcatcatctcccggcgctctaccgcgtcgcttgaccacaggcctgactccaccagcgcgctacaggccatcgaactgctgcaccgcgcgcagagtacttaacgccggggatcggttctcgctcggcgggaatggtccacatggcgttatgcaggtcaatttcatcccagcgggcaaagcgcagttcgctggagcgaataaacagcaacagcgccagctttaccgccagttgagtcagcttacgtcctttgaaatcgtcgactctttccaggaaatcagggatgagattaagctccagtgcagggtggtgacgcactttgggcgtggagacagcgccggttaaatccgatgcggggttatgatcgataatgccgttctggacggcgtagcgcattacacaggcggtacgctgctggagacgagaagcgacatccagtttgcccgctttctccacctctttgatgggcaccagcagctctttgaccttcatcttggtgatgtcgcagctgccgttcgtggggaatacgtaaagttcgaaataacgcaacacccgcttcttatgctccgctgaccagttcacgttgctggagacccattcgcgcgccacggactcgaacgtataaaggggctctccaccccgcttttcctctctgcgtttttccgccggattaatgccttctaaaataagccttcttatatctgcttgcttctcccttgccagtgccagagaaataagcggataagggcctaatgccatacggttctctttgtttccaaagcgaaatttcagataccacagcttagatccgctggggttaacctgaatgtaaataccgtgactgtcagagagcctgtatgacttgccaagcggcctggcatgccggattgcgcgatctgtaagcgccatttgggggtcactcctctatcgaaccgggtttgcccccttttttgcccccaaatcgcgtggatgtcaatggatgaaaaatgaccaactcggaaagactataaaataaatatggctattaccgaaaaataaattatctttgaattacagacggatatggacgaatttggacggaaatggacacaaaaaaagccacccttaggcagctaattattgcatcacttggtgccgaaggccggactcgaaccggcacgtatttctacggttgattttgaatcaactgcgtctaccgatttcgccacttcggcactgaagggatacggaaaacgttttggattatacctgtcgatagccgccatgcaagcaacagcgtgcatcagtagtgctaagtgttgaaaaaaacagcgtaatcccataaacgagcggtgcggcgtcacatttttcagtcatcaatgcgcaacaaaccggctccctggccttcacttccctgcccctacgaccaacacatcactaatcccgccccaatttttctcaaatctatctcacattacaccctcatcgcgccaatgttttatcgccgccaaccataagcatttacgcttcctcaaacactcaatataagattccagaataattaaagtaattaatttatatattccataaaaaactacctcatcgctttttcttattacctcaacccttaaggatttattaattacgtcaatatttttataactttacattaatgaaaagttttgtgttcattctttattccaggattttcctcaggcgtgaaagttccggtaaatactatttttactagtcgctgtacgagtctcgatggacattttcactcggtgaattaaatcaggagaaagactgtgactaccctaaaacctttactggcgcgtaaccgcagctgggcgctgcagaagtgccagcatgacccggaatattttgaaaaactggtagccgggcagcggccacattcgctgtggattggctgctccgatagccgcgttcccgccgaagtgctcaccggcagtcatcccggcgaactcttcgtccaccgcaatatcgctaacatgattgaccccgccgacgacaactttatgagcgtattgcaatatgccctccactatctcgaggtcgaacgggtggtgctctgcggccactacggctgcggcggcgtacaggcggcgctctcgttgccggagatgccgctggcccacgagtcctcggcgctggcccgccgcatcggctcgctgcgcgataccctgcagagtgatatcgctgctctgacgctcactgacactgacgccgacgcgaccgcggcgctcaatgccctggtggaggccaacgttcgcgcccaattcagccgcctgcttgactgtgaccctgtacagacgctgctcgccagcggacggccgctcagcctgcacggctgcgtctacgatctggcatccggccatctgaccactctcgtcgaacacctctcacctcaggagcatgccccatgaatactcttcgtcaggactccctcgcaggcattgtcgtcttccttgtcgccctgccgctgtgcctcggcatcgcccaggccagcggcttaccgccctttgtcggtctgctaaccggtatcatcggcggcctggtcgtcaccgccctcagcccctcccgcttcgccgtcagcggccccgccgccggactggtcaccatcgtcgtcgccgccattgaatccctgggttccttctccgtcttcctgatggcgctggtgctggccggcgtgctgcagctgctgttcggcatcctgcgggccgggcgctttatctcgctggttcccgccagcgtcatcaaaggtatgctggcggcaatcggcatcctgctgattatgcagcagatccccgtcgcgcttggcagcgcagaagagaccaggctcgttgatatcgtgcagggtaacgccaccttctccttcagtgctatcgccgtcgcccttggcggcctgctggtgctatggctgtggggttcgccgcttatccgccgggtgaagagcctacgctggatccccggcccgctgatcgctgtcctgctcggttgtgccaccaccgtatttatgacccaggccgcgccgcagcagcttgcctccctgccgcgcattaccctgccggagttcggtagcctcggcgatctgctgggcgagctggagtctcctgcgtggagcgcgtggcgtaatccgtcggtgtgggtggtggcgctaaccctcgcgctggtcgccagcctcgaaaccttgctcagccaggaggcgctgaaaaaactgcgtccgcaaaatccgccgccttcgccgaaccgcgaaatggtcgcccagggcgtcggcaacctgctctccggcgtactcggggcgatgccgatcaccgcggtcatcgtccgcagctcggtcaacgtcagcaacggcgcgcagagcaaactgtcgatctttatccacggcgtgctgctactgatctgcggactgtggtttagcggcctgctgacgttaatcccactcgccagcctcgctgccgtgctgctgtacaccggctataagctggcgacgccgcggctgttcattgaacagttccgccagggcgccgcacagtacgtccccttccttgccaccattggtgggattatcggcttcggcatgctggcggggatcgggataggactcgccgcccaggtggcgttcagcatctggcgtagccatcgccattcgctgcaattggcccgttacgacgaccactacgtgctgcgcatccagcagaacctgacctttttacacaatccacatctgctggcgctgctggcgaaaattccggaaaagagcgtggtgatcgtcgagcacgataacgtcggctaccttgatccggatgtgcaggcggtgctggatgattttgccgagagcgcgccgcagcgcggtatccgcctcaatcagtggccgcttgccagccgctgaccgtctcccgggcggctggtccgcccgcttatccacccctcctaatgccaagcgacgcctgttgccatgctctacactttcttcgttactacgccaacccaaggaaacaaacatgagcatcattaaaagttacgccgccaaagaagcgggcgccgatctgtcgctgtgggagtacgatgccggcgaactgttgccggaagatgtcgaagtcgaagtggagtactgcgggatttgtcattcggacctgtcgatgatcgacaacgaatggggcatgtcgagctacccgctggttgccggacacgaggttattggccgggtggcggcgctgggtagcgcggcgcaggataaagggctgaagattggtcagaaggtcgggatcggctggacggcacgcagctgcggccactgcgacgcctgtatcagcggcaaccagatcaactgcctggaaggctcggtaccgaccattatgaaccgcggcggcttcgccgataagctgcgcgccgactggcaatgggtgatccccctgccggagagcatcgatctggcttccgccggcccgatgctgtgcggcggcatcaccgtcttcaaaccgctgctgacccaccacgttaccgccaccagccgcgtcggcgtgattggtatcggcggcctcggccatatcgccattaaactgctgcgggcgatgggggcggaagtgaccgctttcagttccaacccggctaaagagcaggaagtgctggcaatgggcgccgatcgcgtggtgaacagccgcgatccgcaggcgttaaccgcgctggccggtcagttcgatctgatcatcaacaccgtggcggtggaccttgactggcagccgtacttccaggcgctggcctacggcggcaacttccacaccgtcggcgcggtgatgaagcctttcccggttccggcctttacccttatcggcggcgaccgcagcatctccggctcggcgaccggtaatccgtccgaactgcgtaagctgatgaaatttgccgggcgtagcaaagtggcgccaaccaccgaactgttcccgatgtcgcaaattaacgaagccctgaaacacgtacgcgaaggcaaagcccgctatcgcgcggtactaaaagccgacttctgattggtatttatcgccgggcgtcccgtgcgcccggcgcttttctctttgcttcatcaaaccgtcatctccccgccattcctctgtagtcatcacttcccacaatccgggcttccataaacgcctgaacgagacgcccgtcaccatgaataagcgctggctcccctggctgatactgtcgccttccctgttgtttttactgctgtttacctggtttccgcttggccgttcggtctatgacagcctgtttgatacccgcatggccagcgacggcgcacagtacgtcgggctggataacttcgcccgcctgtttgccgacggcgttttctggcagtcgctggtcaataatctgctctatatcctgctgacggtggtacctggagtgacgctcgccctgctgctggcggtggcgctgagcgagaatcaccgcgtcaaccgctggctgcgcaccgcctttttcttcccgatgattatcccgatggtcagcgccgccgcgctgtggctgtttatttttatgcccggcctcggcctgctcgatcactatctggcgaagctatttggcccgctgaacaacaattggctggggcgcagcaacagcgcgctgctggcgctggcgctgattggcgtgtggaagttcgccggttattacatgctgtttttcctcgccgggctgcagagcattccggcctcgacgcgggaagcggcactgatggaaggagccagccgcactcaggtgttttttaaggtcacgctgccgctgctgcgcccgacgctgagctttgttatcaccaccgcgctgatttactccattacccagattgatcacgtcgcagtgatgacgcgcggcgggccggataacgccacgaccgtgctgctctattacatccagaatctcgcctgggatacccacgaccttggcaaagcctccgccgccaccttcctgacgctggccgggctgtttgccttctcgctgattaacctgaaattgctggaaaaaggagcccactatgagcgctgaaatctcgccgctgatggtccgctcgcccgccgctgcgcgtccactgtggttgcgcctgcgtcgctcgcagccctttaccctgacggtaatcatgtgctgcctggcgctgctatgggtgagcccgtttatctggatgctggcgacctcgttcagcgccaccaccttcggcgaagatatggcctcattgctgccccgtctgccgctgactctcgataacttccgcgacgcctgggacagcgccgactggctgagcctgtacgccaacacccttatctttacctttggtactttcttcgtgcagctactcaccatcaccaccgcaggctacgtcttcgcctgccacgaatttcgcggcaagaaaacgctatttctgctgtttctcgtccagctgatgatcatgccggtggtgatgatggtgccgaacatgctgactctgaaaaccttcggcctgctcaacactctgaccggcgtgatgatgccctacttcacctcggcgttcggcgtgtttctgatgcgccaggcgttcctcgccatcccgaaagagctggaagaggcggcactgatggagggatgccgctggtggcaggtgctattccgcgtactgctgccgctgtcctggccgtcggtactggccttcgccaccgtcagcattacctaccactggaacgagtacctgtggccgctgatgatgctcaacgatcccgataagcaggtgctgacggttgggctggtctcattcgccatgggcgctgaatccggcggccagtggggcaccatcggcgccgggacgctgatggtctgcctgccgctgatgctggcgttcatccttttccagaaacagttcctgcgaagcttcggcttctccgggatcaaataaggagttattcatgctgttagcgcacatttccgatacccatttccgcagtcgtggcgagaagctgtatggctttatcgacgtcaatgccgccaatgctgatgtggtttctcaacttaacgcgctgcgcgaacgcccggatgcggtggtggtgagcggcgatatcgtcaactgcggccgtccggaggagtatcaggtcgcccgccagatcctcggcagcctgaactatccgctgtatctgatccccggcaaccacgatgataaagcgctgtttctggagtacctgcagccgctgtgcccgcagctcggtagtgatgccaataatatgcgctatgcggttgacgacttcgctacccgcctgctgtttatcgactccagccacgccggcacttcaaaaggctggctgaccgacgagaccattagttggctggaagcgcagctgttcgacggcggcgacaaaccggcaacgatctttatgcaccacccgccgctgccgctgggtaacgcgcagatggacccgattgcctgcgaaaacggccaccgtctgctggcgctggtggagcgtttcccgtcgttgacgcgcatcttctgcggccataaccatagcctgaccatgacccagcatcgccaggcgctgatctccaccatccccggcaccgtccatcaggtaccgtactgccacgaagacactcgcccatattacgatctctcgccggcttcttgcctgatgcaccgccaggtcggcgaacagtgggtgagctaccagcactcgctggcccactacgccgggccgtggctgtacgacgaaaacatcagttgtccaacggaagagcgataaccgccatgctcagtctgcaaaacatcagtaaacatttcgacggtaaacccgcgctcagcgcgctgtctcttgatattcacgaaggcgaatttgtggtgctggtcggtccgtcgggctgcggtaaaagcaccctactgcgcctgcttgccgggctggatcaggtcagcgaaggcgaaatctggttgcatgatgagaacatcaccgacactacgccgcgagaacgcaattttgcgatgatcttccagaactatgcgctgtttccgcatctgtcggtgcgagacaacatcaccttcggcatgaaggtacgtaaggaagaaaaaagcggctggcagccgcgggtagataaagtcgcgcagatgctgcagctggaggcgctgctcgatcgcaaaccggcgaagctctccggcggccaacggcagcgggtagcgatggcgcgggcgatcgtgcgtaatccgcggctgttcttaatggatgaaccgctttccaacctcgacgcacgcctgcgcagcgaagtccgcgacagcattatggacctccaccagcagttaaaaaccagtaccgtctacgtcactcacgatcaaaccgaggcgatgtcgatggccgatcgcattgtggtgatgaacggcggccacgtgcagcaggtaggacgtccagagtatctgtatgccaacccggccaatctgttcgtggccggatttatcggttcaccagcgatgaatctgctatcgctcccctgcgttgagggcaacgttcagcttggcgaacaacgccatccgctaccgccacgccaccgcagccagacccgtgtctggctgggcattcgcccggaacatattaccgaccgcgtggagcaaggccatctgcgcctgccgggcaccgtcctgcaacgagaactgatgggagccgattatctgctccacgtgaacaccccgatcggcaccctgcgctttagccgccgccaccgcggcacggtgccggaaaaaggcgaatcgctgatcctcggcttctcgcctgccgatgtacatctttttcatgctgagacccagcataatttactgatggagtgtaatcatgtttaaccccctcaccgccctgacggttgggctcagcctcgccctgagcggcgcggcgctggcgaaagaaaaaatagacttcatgttcccggccccggtagacggcaagctgacgatggagatgacccgcgttattaaagcgttcaacgactcgcagcaagatgtcgaagtacgcggcatcttcaccggcaactatgacaccaccaagatcaaagccgaatcagcacagaaggccggacaaccgccggcgctggtgatcatgtccgccaacttcaccaccgatctggcgctgaaggatgagatcctgccgatggacgagttgtttaaatatggcgatcaaaaggccggcgattttctgcaaaaggagttctggcccgcgatgcataagaacgcccaggtgatgggcaccacctatgcgatcccgttccataactcgacaccgatcctctactacaacaagacgctgttcgatcgggctgggatcacgcaaccaccgcagacctgggccgagctgctggccgatgccaaaaagctgaccgacgagagcaaaggccagtgggggatcatgctgccgtcgaccaacgacgactacggcggctggatcttctcggcgctggtgcgcgccaacggcggtaaatatttcaatgaagattatccgggtgaggtttattacaactcgccgaccgctatcggcgctctgcgcttctggcaggatctgatctacaaagacaaagtgatgccttccggggtactgaattcgaagcagatcagcgcttcattcttctccggcaaacttggcatggcgatgctcagcaccggcgcactgggctttatgcgcgagaacagtaaagattttgaactcggtgtcgccatgctaccagccaaagagcagcgcgcggtgccgatcggcggcgccagcctggtaagctttaaaggcatcaacgacgcgcagaagaaagcggcctaccagttcctgacttatctggtgagcccgcaggtgaacggcgcgtggagtcgctttaccggctacttctcgccacgcaaggcttcgtatgatacgccggagatgaaagcatatctgcagcaggatccgcgggcggcgatcgcccttgagcagctgaagtacgcgcatccgtggtactccacctgggagaccgtcgccgtgcgtaaggcgatggagaaccagctggcggcggtggtcaacgatgccaaagtaacgccggaagccgcggtacaggcggcgcagaaggaagctgacgcgctaatgaaaccttatgttgataagactgcgctgggagaagtgaagtagcgcaagtctgtagcggggcgcccggcttgcggcgtaaatgcccaagccgggtgaccaaccgccccagcgtagaatgcgccggggagattttgtcgaagccttagattttatccgcctgcgacgaagcccaggatttacgcgcgtaggcttttcccgccgggctggtatccagcttctcacgcagatagtgttcgatctgctcaaggctgcggttgcgcgtttccggcacgcatttgatcacgaagatcgcgccgaagataccgattgcagcaaagataaagaaggttccggagaggccgacccacgacagtagcatcgggaagaacagcgagatcaggaagttggcaatccacattgagaacaccgccccgcccataaacatcccgcgcatccgggttgggaaaatctccgacaacagcagccaggttaccggtgacagcgccccctgttggaagcttaggaaaagcagcattcccgccagtaccatataggcgcgcagcgcatccggctgaccattgaccgtttccggcagcaggtagctcaccgcgccgataaataccaggcaggcggtacagccgaactggccgatcatggtcatcgggcgacggcctatcttccccagcatccagatgccgacaaaggtcatcagcaccgaaaccacgccgttggcaatggtggcgaacagcgcggcattatcggtcataccgaccgaggtcagcaccgtcggcgcatagtacataatggtattgacgccggtaagctgctgaataaccgccacgccgataccgatcatgaacagcttaaacagccacggggtcatgatttcacgaatttttggcttaccaagattgcgctgctcgtcgagagtttccgtaatctccattagctcccattcgacatcatctttacgccgtgtacgctccagcacccggcgagcttccgccagtcggcctttcatcgcataccagcgcggggtatccggcataaacatcatgccaaaccacagcagcacggcaggtagcgtcgccaccgccagcatccagcgccaggtactttcaccgccccacagctcatggaaggtggcgttagagatataggccagcagctgtccagagacgatcatcagttcctgcagtgtgaccagttgcccgcgtttgttggcgggcgccatctcagcaatgtaaaccggcaccgttgccgccgcgccgccaaccgctacgccgagaaccaggcggaagaaaatcatccagttgacgtccggcgcgagggcggtacccaccgcgccgatagcgaagatcaccgccagccagaggatgattttctttctgcctgcggcgctggccagatggccagaaagcagtgcgccgaatgcggcgccgaacagcagcgagctggtcaccagcccggtggtaaacggcgtgagatgcagttccttacccataaacagcagggcgccggaaatcaccccggtgtcgtagccaaagagtaaaccgcctaaggtcgcaatcaacgcgacgatcttaacaaacggcgttgccggggcgtcgctattcggccccgacgctttattgagtgtgagatattgttcctgtgacatagaagactccagtaacctaccttgtagggggaagatatgctcttgtctgaatacagaggcctcctgcctcacggacgtgtcgttctcgtgtggttctcttgaggtttagaaaaagcaggccacgcagctgtgtggcccgaaatgcatcaacgatcagattcctgccgtttcgcggatgtacttacgcgcctttacggcgtattcgaaggggttcgccagcgcagggtcttgttcggcttccactaccatccaccccttgtagccatagtcatccagcaactggaagaccggacggaaatctatttcgccgtctcccggtacggtaaaggtgcctttcttgacgccgtcgaggaatgagagcccttcgcggcgcacctgctcaatcaccgcggggcggacgtctttcagatgcacgtggttaatgcgcggcagatattttttcaggatcgccagcatcggcgcctcgccgccctctgaataccaggcgtgaccggtgtcatagagcaggaagacgcgttcgtccaccagcgacataaacttgtcgatctccgcggtagtctgaataccggtgcccatatggtgatgcaggcaaacctgcatccccttctctgccgccagtttgccaagcgcgttataaccttcagctacccgctgccactcttcgtcgctaaagcacggttttacatcgccgagaatcggtttatcgagcccctggatactgccgctttgttcagagcagccaatcaccttcgcgcccatcgcatggaggaaattcatgtggttaacgaattcatcgatggttttttctctttggccattcgcgaagaaggtgctgaaccaggcgttgcaaatttgcatgccgcgaatatccagcatcggcttcagcaccgccggatcgcgcggatatttgctgccgacttcgctgccggtaaacccggccagcgccatttcgctgaccgtttgctgaaaggtgttttcgcttcccagctcaggcatatcgtcgttagtccaaccgataggggcgatagccagtttgacgttctctttgttcattttgatgctcctgccgccgcgccttaccggcgcagcagttcacgttcgataagttcacgcgtttccacggcctggtatttcatcttttccgggtaaccaaacagcgaggtgcagacgatcggttcaccgccaactttgaaggtctgttcagcgaagcgcatatcgcgcagggtgcggaacagagcatcgaaatcgacatccccctcgccgacgccgacgtgctggtgtacggcggcgtcaacgcccggcggattaacgatatagcggcaatgtttagtgtggttgcgggtatcggcaatcaacacgtgcgacaagtcctgaccggcatagcgcagcatcttctcgacttcacctttacctttgtcgtagaagaaggtgtgcggcacgctgtagacgtacttcacgttgtcgctacggaaggacttcacgatatccaccgtctcgttgttttcttcgcagaagtcccacggatgggcctggatttcgacgcggatcccttcacgttcgaatatcggcaacagttcttccatcgagcggtagaacatctcttcgcaaatttccggctggttaggatcgccggaaaattcggtgttgataacctgcacgcccatctccaccgctacttcgattagccgcttccagttcttcaccgccgcctgacggcgcagctcatccgggccggaccagcgataaacgcagatgaacgaggagagttcaacgccgttgtcacgcagcgcctgcttatactcggccatgatctcccggctggcgcgcggatgtttgtagaatgggttaatctgcgggtgtggcgactgctcaatgtatttgtagccccactccgccacctgctggaccattctggtgatcccgagatctcgaatcacatcgacatcaaaagcaattttcatcgtcgttacctgtttgaaacgttacgtcggtgaaggaggatttagcgttggtagaatgccgggcactcaggcagcgacactactaccggttcgttacactcctgcgctttcagacaagcgtcggcggcaaccgatgccgcgtagccgtcccaggctgaggggccctgcagcttgccggctttcacatcattgataaatgcctgcagttcgacgtcgtaggctttaatgaaacggtctttccagtcggtaaggatggctgtcgacaggctggcggctttacgcatctccaccgccgacggttccggcagacgcgcaatgcccgtttcaccaacgacttcgcactggatgtcgtagccgtactggcagttaacgaagacttcgacatcgatcagggtgccctttttcgtttcaaacgagacgatctgcgggtctttcagccgcgcatgggtatgggaggtcgagcgcgggaagcgcacctgtacggagcggtagtcgtcatttagcagccaacgcagcacgtccagttcgtggatcagggtgttggtgatcgccatatcggtggtgtagttctcaccgaccgactggttgcggtgggcacagcgcagcatcagcggcgcgccgatatcaccgtcgtcgatgaccttcttcaacgccagatagccttcatcgtatggacgcataaagccaacctgaacgaggcgacgcccggctttcatttcagcatccacaatacggcggcagccttccgcgctcatcgccaacggcttttcgcaaaatacgggcttaccggcctcaatagcctccagggtgtactcttcatgggttggatcccaggaggtcaccagcacggcgtcaacgtcgctggctttaatcacatcatgaccgtcggcgtagacttccgcctgcacgcccggcagcgctactgccgcacgggcgttatcggcgttgatatcagaaacggcgaccacggtcgccccctgtaagacctgggtgcagcgacggatatgttctttaccgatggcgcctgcgccgatgacacctaatttgagtgacatgatggttctctccgtagttctgtagggttcaggattcgtgttctgtgttagtaatcccgcgcctgagcgcgtttttcattaatcatttcagcgactttacgtatgcgttccgaaagcgccgtctgcgccacgccgacgttccaccaactaccgtatttgtggaccatggttttcggcagtactttaatgtcgataagcgtgctgacggtttcacggcgagcggcatccagcgcgtggcgaagctcatcgagggtggtgacccgccaggtcttgcagccgtagccggaagcaatcgtggcgaaatccaccggtaccagcccgccctgcaaccggccgttttccgccgagcggtagcgaaactcggtgccgaagctatccataccgtgttccagctgcaggttgttgatgcagccgttcgccatgttgtcgagcagaatgacgttgatcttcgcccgctcctgcagggaggtgaccagttcagaatgcagcatcatgaaggagccatctccgaccagcgaatagacctcgctctgcggctgcgccagcttcacgccgagagcggcgttaacctcatagcccatgcacgaatagccatactctacgtgataggtattcggcgcccggttgcgccagacgcgttgtaaatcccccggcaggctgcccgcagccgccacaatgaccgcatccgccgccagcgactcgtttagcaggccaagaacgctgctttgcgtcagggtggaatccgtgatttgacggaattcgcgataaaccgattcacgatcaatatggtcgtcaatttctggtacgaaatccgtttcctgccagaccgcctggtagacgcgctgggtctctttcatctgccggctctgcacgcttgcaatctgcgcgccccatcctgcctgccaggactcgttcgccagcgcagcgctgagcgcgcttagcgcctcgcgggcgtccgccagcattgggatgccgtccagcttccaggcatcaaaattactgacgttaacgttaaggaagcgcacgccaggggattggaatatccatttcgaggaggtggtgaaatcgctaaaacgcgtcccgataccgatgaccagatcggcctctttcgccaacaggttggcagccagacagcccgtttcgccaacgccgccgacgttcagcggatgcgatgaaaccaccgtgcccttaccagcctgcgtttccgcaaacgggatgccgtaacgttcagcgaagctcaccagcgcatcgcctgccgcggaatatttcacgccgccgccgcagacgatgagcggtttacggctggctttaattgccgctaccgcatccgccagctgcgccgcgcttggcggacggcgatccagacggtggacgcggcgggcaaaaaaggactcgggataatcccaggcttcgccctgcacgtcctgcggcagacacaaggtgacggcgccggtttccgccggatccgtcagcacgcgcatggcattaatgcaggcgctcatgagctgttccgggcgggtaatacgatcccagtacttactcaccgcgcgaaatgcgtcgttagtcgtgatactcagatcgtggctctgttcgatttgctgcagtaccgggtccggctggcgggtggcgaatacatcgcccggcagtaatagcagcgggatacggttggccgtagccgtcgccgcggcggtgatcatgttggccgcccgggaccgatggaagaagtacaggcaatgatctgccggcgcagtgattgacgggcaaagcctgtggccgcatgagccatgccttgttcattacgcccttggtaaatccgcagttcgccgctgttctcttccagcgcctggcctaagcccaacacgttgccgtgaccaaaaatagcgaaaatccctttcacgaatttctgcgcttcgccgtccacctccagatactggttatcaaggaacttcaccagcgcctgcgccattgtcagtctcagtttgcccatgttgcctaatccttatcgttcagtatttgtcgtgtgagttagcgctttgcttgccaaagaagatggcgtaggtgcgggaaagccgttaacgtccactggaatatttttggattataggcaaacatttttttcattaaacacaaatacagaagaaatgtttcattttgcgagaaggatcaaactctctacccatttcatacgtttcacttacatctccttcgcgagcagtcttccaaacaaaagaggaaaaataagattatctacatgaaaattatggataatattgatattaaaaaaggagaacatgggtaagcgggacgcagacagcatgtatgggtgggcagctgcgtacccacgcagagtggtagatccttcacacttttggttttttaatttcgattagatttgaaaatgaaatatttatttctcaaactagagataactaataaccatcaggctgttcacggcagactgtcactcatacgaccttctcctggcagcagatttgcaaaaggaaaccctagcgatgaatgcagcagttaagcggctcgacgtcatctgtattggccgggtggccgtcgatctctacgcccagcagataggggcaaggttggaagatgtggccagtttcgccaagtatctcggcggctcctcgggcaacgtcgcctttggtaccgcgattcagggattaaaatcggcgatgctggcgcgggtgggcgatgagcacaacggccggtttctacgtgaaaccctccgccgcgcaggtgtcgataccgaatatctgatcacggataaagaacggctgaccgcattggtgatgctgggcattaaggatcaggataccttcccgctgattttctaccgcgacaactgcgccgatatggcgctgacgcctgacgatatcaatgaggagtacatcgcctcttcacgcgctctggcggtgaccgggacccacctttcacacgccaatacccgggacgcggtattgaaggcgctggaatacgcccgccgccacggcctgcgtaccgcgctggatatcgattaccgtccggtgctgtggggcttacttcgctgggcgacggtgaaacgcgtttcattgagtcgggtccggtaacccgtcagttgcaggaagttctgcacctcttcgatttagtcgtcggcactgaagaggagtttcatattgccggcggcagcaccgataccctcaccgcgctgaaaaacgttcgccatgccaccaaagcgacgctggtctgcaagcgcgggccgatgggctgcgtggtgctggagggcgccatcccggatagctgggacgaagtgccgttgcagcaaggcgttcgcgtcgaagtactcaacgtgctcggcgccggcgacgcttttatgtccggactgctgcgcggctggcttaatgatgaaggctgggaacaggcctgccgctacgccaacgcctgcggcgcgttagtggtgtcacgtcacggctgcgcgccggcgatgccgacaaaagtagagcttgatgattatttatcgcgggccgatgccgttccgcgcccggatatcgacgcgcggttaaatcatttgcaccgggtgaccagtcggcgccagccgtggccggaactgtgtatcttcgcctttgaccatcgtaaacagctggcggatctggcattagaaaccgggcgcgacccggcctgtattcccgaactcaaactactactgttggccgccgccgaggcggcagccacagaggccggactggatcggcgcagcggcatcctcgccgatggtacctatggtcaacgttcacttaacgccattaccggtaaaggctggtggatcggtcggccgattgagctccccagctcgcgtccgctacgtcttgagcatggcaatattggctcacagctgatcgactggccgcttgagcacgtcgtcaaatgcctggtcttttaccacccggatgacccggcggcgctgcgcgccgagcaggacgcgctgctgctggaagtctggcaggcctgcaataagtccgggcacgagctgctattggaagtgatcctgccggagaacggaccggacaaagatgaacgccactaccacactatgctggagcacttctatcagttgggcatccagccggactggtggaagctgccgccgctggccagcgcccagtgggagcggatctcagcgcttatcgagcgcgaagatccgtggtgccggggcatcctgctcctggggctggatgcgccatcggatcgattgcgttcaggtttcgccgaagcggccgggcacccgatgatcaagggttttgccgtcggccgaaccatctttggtcaaccttcgcgccgctggatgcagggcgaactggatgacgcagcgctaatcgatgaagtgaaacggaactatctacggctcatcggctactggcgcgaagcgcgcggctaacctccttcaggcccgccacttgcttgaaagcggcgggcctgcggtttcttcgtgaaatgaatcgcgtatttcatcgcaaaaaatgaaaaattcgcttcatttggtacactggaagccatattccttccattttctcagagcgcaacttatggctaataatccgacccaactgaccatcctgcaggatgaaatcagacggcgctacgacacgctcagcaaacgtctgaagcaggtggcgcgctatatactggataacagtaatagcgttgctttcgatactgtagcctccattgcgcaacaggctgacgttccgccctcaacgctgattcgcttcgctaacgcctttggcttcagcggctttaacgaaatgaagcagatgttcaggcagcatctgatggaagagaccgccaactacaccgagcgcgcgcgtctgttccgccagactactaacgacgaaacaaccccgccggaaacgccgacggaaatcctcaacatgttcagcatggtcaatacccaggcgctgcagcaactggcaatgcagacctccggtgaagatctcaaccgggcggtagatttactggcggatgcggaaaatatctatgttatcggtctgcgtcgctcgttcagcgtcgcctcttacctgacctacgcgctgcgccatctggatcgcaaagcctttctgatcgacggccttggcgggatgttcaccgaacagctcagtctggtggggccgaaggatgtggtcgtggcggtgagcttctcgccttatgcccgtgaagtggtggagctggttgagcttggcgcccagcgcaaggcgcgacaaatcgccattaccgatagccaggtaagcccgcttgccgccttcagtgatgtgtgctttgtggtgcgtgaagcgcaggtcgatggtttccgttcacaggtggcctcgctgtgcctggcgcagacgctggcggtatcgctggcattgaatagcagcaaagagccgcagcagcaccgcgcctgattgcccgttgcgctagcggtaaacaggggcaatcaatagacaaaaaagccgggacatccccggcttttctcgtatatcgcgcactatgaatagcgatcgctgttgatccaggcgtgatcgtcttcccaggtaaatagccacttacgatccggccccgccatcacgttcagatagtagctgttgtaaccggcgatcgccgctaccggatggtagccgcgcggcaccatcaccacatcatggttatagggtgccatacaggcatccagactgcggtcatcggtgtacactcgctgaaaggcaaaaccttgcggcggatcgaaacggtggtagtaggtttcttccagctgggtttcctgccccggcagcgcggtatcgtgcttatgcgatggccaggagctggtcgccccttcttcggtgtagacttccactaccaacaggcaatccgcctgcgcattatccggcagaatattatgtaccaaccgctggttacgccctttaccgcgatgctctacgccgacatcctcaggccgtatcactcgcgccgggaagctgcctttgcccggcgcgctgcaaaccgccagctcaagatcggaatctgcagtgacctcgaccttatcctgcggcggcacatagaccgaccacggcggcgtacgctcgaatggcgacatgcgtttaccgaggtcgggaaaatcggcgtgctgagttttgatcgaggccagcccagagaccagtaccagacatagctcacggtcagcgctctccagggtcacggtttgcccctgttttaacatccagacatcaaagccaatatactgccaccccgcgctctgcggggtgatgtgctggatatgtccctctttttgcgctttagccaataacgacatagcgttctccttcgccgattaacctaacgtcggcatactgaattcagatacggtttgctgcccctgcggccagcgcacggtggcagttttcatacgggtatagaagcgaacgccgtctggcccgtggacgttcagcgcgccaaataccgagcgcttccagccgccaaagctatggaaggccattggcaccggcaccggtacgttgacgccaaccatgccggcctgtacatcatgaacgaactcgcgggcggtatggccattgctggtaaagacggcgctgccgttaccgaattcgtggctgttaaccagctccagcgcgctttggtaatcagcgacgcggacgatccccagcaccgggccaaaaatctcttcacgccagatggtcatttccggagtgacgtggtcaaacagcgtaccgccaacgtaatatccgtcctcatggccagccacgcgcagcctgcggccatccaccaccagcgacgcccctcgctgacgcccttatcaatatagccgagtacttttttctgatgcgcttcagataccaccggccccatttcgttttcgtctttaccgcgcaggcaaccggggccgactttcagagactcaactaatggtttcaggcgggcaatcaacttatctgcagtctcgtcacccacggccaccactaccggcagggccatacagcgctcgcctgcggaaccatacgcgccgcccatgatggcattcacggtcgcatcaagatcggcgtccggcatcacgatggcatgatttttcgccgcgccaaacgcctggacgcgttttccgtgagcgctggcggttttatagatatattccgctacgccagaggagccgacaaagctgacggcggcaatacgcgggtcggtataaagctgttcggcatcttcattgctgcaatgaatgacgttaaaaacaccgtccggcagaccggcttctttcagtaattcagccatgcgtaccgccgcggtcggcgccagcgccggtggtttcaggacgaagctgttgccgcaggccagcgcgatggggaacatccacatcggcaccattgccgggaaattaaacggcgttatccccgccaccacgcccagcggctgcatgagcgaatagctgtcgacgccggtacccacgtcggaagaaaactcacctttaatgagatgcggaataccgcaggcaaactcaaccacttccatgccgcgggtcagctcgcccaacgcatcggaccacactttgccgtgctcgctaacgataattcccgccagttcatcgacgtgctgttcgagcagcattttaaaattgaacagcacgcgggcgcggcgcagcggagtagtacgggaccagctgtcaaaagcgtcgcgagcgacctggattgcgtcggaaacctcctgcgcggtggaaagcgtgacttcgcgaactacatcgccagtggccgggtcgtacaccggaatcgtttcccggctgctgctggttactgttttcccaccaataaagttacctgtgatagtcatcttctcgcctcatagtgtagaaggccgttcaagttacggcccgtcgctgattgtgctgtgctataaccgtagtaaaatgaaatttatatttcaataaacagataaaatgaaattctactttggtgatagctgtcgcatttttcagcaaacctctctctatgtgatttcatatcacagcagtatcgaaggtgagattttatgcggttagctttgatgtaaaccatgaaatgttgcagcaattattttgcgatcgtgctcaaacaaccatcatttcatccattgccaatgatgaaataaacattttaactatcaggcaagcgaactaaaccagtcaacatcttgtcaggagtgtcaaatgaccattgccctgcagcgtttctgtatcaatcgtaaaattgcgccatcgctcagcattgaagcgtttttccgtctggtaagcgaactcgggctgcataaggtcgagctgcgtaatgatttacccagcggtaaagtcaccgacgcgctcacccaccagcaggtgcgcaagctggccgaccgataccagcttgaaattctgacgatcaacgccgtctatcccttcaaccgccacagcgctgaagtacgtcagctgacggagtcgctgctgaaagaggcgcaggctattggcgccaaatcgctggtgatgtgcccgttaaatgatggcaccgttgtagcgccgcaagaaacgcttgccgctatgcgcgagctggcgccgttgttcgaacaatatggcgttcagggcctggtcgagccgctgggcttcccacaaagttcgctgcgctcggcggcacaggcgcaggcactcattcgtgacgctcaagtgccgtttaagctgttaattgatactttccaccatcatctttatccacaagcagaagaggaattcagccagctggacattgctgagataggtctggttcatctctccggcgttgacgatccccgcccgcgagaacagttgaccgacgacgagcgcatcatgctgacgccgcatgatcgcctactgacctgtcaacaggtgcagcatctcgaagcccgcggataccagggagattacgccttcgagcctttcgctccgcagctggcgtcatggcgcgaagaggatattcgccgagagattgaacagagcattgcgctgattcagcgccactgcgcgtgagattaaacgttgagagttatcgatttcctccatctttttgctgtcaggttgcctataatcgacgcaggataaatggaggaatcgatcatgagctcacccctgctgattgcgcgcacgctggataaacaactgcatctgctgcctgcaatggctaaccgtcacggcctaattaccggcgccaccggcaccggtaaaaccgtaactttgcagaaactggcggagtcattttccgagatcggcgtgccggtctttatggccgatgtgaaaggcgacctgaccggtatcgcggaggcaggccagagctctgagaaacttcaggcgcgtctggagaaaatcggcgttaccgactgggagccgcacgccaacccggtggttgtttgggatatctttggtgaaaagggccacccggtacgcgccacggtgtcggacctcggccccctgctgctcgcccgcttgctcaacctgaatgaagttcaaagcggcgtgctgaacattattttccgtatcgctgacgatcgcggcctgctgctgttggattttaaagatctccgcgccattacccagtttatcggtgataacgccaaagccttccagaaccagtacggcaacatcagcagcgcgtcggtaggcgctatccagcgcggactgttgaccctggagcagcagggcgctgagcactttttcggcgaaccgatgctggatatacaggactggatgcgtgtccatgccagcggtaaaggggtgattaatatcctcagcgccgaaaaactttatcagatgccgaagctctatgccgccagcctgctgtggatgctctccgaactctacgaacgcctgccggaagccggcgacctcgaaaaaccgaagctggtgttcttcttcgacgaagcccacctgctgtttaacgatgcgccgcaggtactgctggataaaatcgagcaggtgattcgccttatccgttctaaaggggtcggcgtctattttgtctcgcagaatccgtcggatatcccggatgccgtgctcggccagttgggcaaccgcgtacagcatgccttgcgtgcctttaccccgaaggatcaaaaagcggtgaagaccgccgcccagaccatgcgcgccaacccggcattcagtaccgagcaggccattcaggagctcggtaccggcgaagcgctgatctccttcctcgacgaaaaaggcagtccgtcggtagtagagcgagcgatggtcatcgccccatcttcacggatggggccggtcagcgacgatgagcgaaatggcctgattaaccactcggcgctgtacggcaagtatgaagaagagattgaccgcgagtcggccttcgaaatgctgcaaaaaggggtgcaggtcgctaccgagcagcagtcggcgccgccggcaaaaggtcaacaaagcggcgatgacgacgggctactcgggggctgaaagatattctgttcggcactaccggcccgcgcggcggtaaacgagatggtatcgtgcaaactgccgccaaaagcgccgtacgtcaggtcactaaccagatcgtccgcggtatgctgggaagcctgctcggcggaaggcgccgttagcgcaaggacgccgaccccggattgcggcgcgctgtgcccaatccgggcgacaacgcgacaacaccacagggcattacactgcggatagccactcaaacaacaggcacaaaaaacccggcgttgcttgcgcttggccgggtaatttatcgaactacgcttttctcatcatcagccaaaggcttatcaggaagaaactagcgcttggcagcagcgcaccgattatcggcggtatgccgtaaaccaacgtcagtggtccaaatatctggtcaagtacgtagaagataaagccgaagctaatcccggtaacgactctcacgcccatcgccacgctccgcagcgggccaaaaatgaatgacagcgccatcagcatcatcacagccaccgacagcggctggaagattttgctccacatgttgagctggtaacggcccggatcctggccgctggacttcagataggtcacgtagttatgcaggccgctgattgacagcgcgtccggatccaacgcaaccacgccgagtttgtcaggcgttagcttagtcttccaggttccgctcaccatttgcgtgccggtgacctgtttcggatcggtgagattagattcatccacctgcgacagacgccagatcttagcttcattatcaaacttcgcggaagcggcgtaacggactgattgcagacgacgattatcgttgaactggtaaatgctcacgccgcctagttcatcgttgcccttcacccgctcaatatagacaaaattatgcccgtctttcgcccacaaaccctgctgggtcgacagcagcgaaccgccgtacatctgctgcgcacggtagttgcgcgccatctgttcgccctgcggcgccacccattcacccatcgccatggtcaacaacaccagcgggatcgccgttttcatcaccgccagcgccacctgcatacgggtaaagccggaagcctgcatcaccaccagttcgctgcgctgcgctaacatccccagccccagcaaagccccaagcagggccgccattgggaagaaaatttgcacatcttttggcacgctgaggatggtatagagtccggctcccagcgcatcatagctgccctgcccggctttttttagctggtcgacaaacttaataatgccggagagcgacaccagcatgaacagggtcatcatgatggtgttgaaaatggttttaccgatatagcggtcaagaacgccaaacgcctgcatcacaccgctcctttattaaaccgggcacggaaacgacgcatcggcaccgtatcccacaggttaagcagcaccgccagcgcgaagtagagcaggttcacaccccacatccagatagcggggtccattttgcctttacccgcgttcgatttgatcgacgtttgcagcaggaagaacaccagatatagcagcatcgccggcagcatagacagcacgcggccctgacgcgggttcaccacactcagcgggacaaccatcagcgccatcatgaacaccgccgccaccagcgtaaatcgccagtgcagttcagcgcgcgcgcgcgcggtatcggtcttccagagggtgcgcatattcatctgttcggtgtcgctgggatcggccgctaccgcttgatggccaattaccgcctggtagtttttgaagtcggtaatacggaaatcgcgcagcatcgccgtgccttcaaaacgcgtcccctgagtcatagtgaccacctgggagccgtcctttttctgcgacagctcgccggaatccgccaccacaacggaagggcgcgcgttgcctttcggccgcagttgcgccaggaatacgtcgctaaagcggttgccgttcacgttttcgataaacagcaccgcgctgccgtcgctggcctgctggaactggccctgagccagcgccgccattccagggttggctttggcttccgccagcacttcatcctgatggcgagacgaccacggccccgcccacatcacgttgactgccgcgacggcgccggtaaacagggcgaggatcattgccgccttaatcaatacggctttacttaagccgcaggcgtgcatcaccgtaatttcgctttcggtatacagtttgcccagcgtcatcaacagcccgaggaaaagactcaggggcagaatgagctgcgccatttccggtacgcccagccctaacagcgagagcaccaggttggtcgggatatcgccatctaccgcggcgcccaggatcctgacgagtttctgacagaagaaaatcagtaacaggatgaataggatcgccaactggcttttcagcgtctcacgaaccagatatcttatgattatcactataaatacgcccgtaaaaacccgtcttattgcaggaaaattgcttgtttcatggcttaaacgtcatttattctcttttgtcgtcgaaaacatcgctaagattaaatgactcatcggttctgcgtatcaggatcttttctgacgaaccaaggccgtaataacgttaagattaacacgaagtcaccgcaacagcggacatgagttacgaaagcttgcaattatatactcaatggatttcgagttgtagaaaggcggcaggactgtgaagccccaaagcggcatcagccagcgtcaggggtaagcaggcgtagccaacgcatctgcaactggaaaggcgacgagtatagccgtagccaccactgttgtctttaagattcaggagcatagtgcatggagttcagtgtaaaaagcggtagcccggagaagcagcggagtgcctgtatcgtggtcggcgtcttcgaaccacgtcgcctctccccatcgccgaacaactcgataaaatcagcgacggttacatcagcgctctgctgcgtcgcggcgagctcgaaggcaagcctggccagacgttgttactgcaccatgtgccgaacatcctgtctgagcgcattctgctcatcggctgtggtaaagagcgcgaactggatgaacgtcagtataaacaagttattcagaaaaccattaatactctgaatgacactggttcgatggaggccgtctgcttcctgaccgaactgcacgtcaagggccgcaacaactactggaaagtacgccaggccgttgaaaccgccaaagagacgctgtacagcttcgatcagttgaagaccaacaaaagcgagccacgtcgcccgctgcgtaaaatggtctttaacgtgccgactcgccgcgagctcaccagcggcgaacgcgccattcaacatggcctggcgatcgccgccggtatcaaagcggcgaaagatctcggcaatatgccgccgaatatctgtaacgcggcttaccttgcttcccaggcgcgccagttggccgacacttacagtaagaacgtcatcacccgcgtgatcggcgaacagcagatgcgcgagctggggatgaactcctatctcgccgtcggcaacggctcgcagaacgagtcgctgatgtcggtcatcgagtataaaggcaacccgtctgaagacgcgcgccctatcgtgctggtcggtaaaggcctgaccttcgactccggcggtatctccatcaagcctgccgaaggcatggacgagatgaagtacgacatgtgcggcgcggcggcggtctacggcgtaatgcgaatggtggccgagctgcagctgccgctaaacgtcatcggcgtgctggcaggctgtgaaaatatgcctggcggtcgcgcgtatcgcccgggcgatgttctgaccaccatgtccgggcagaccgttgaagtgctgaataccgacgccgaaggccgtctggtattgtgcgatgtgctgacctacgttgagcgcttcgagccggaagcggttatcgatgtggcgacgctgaccggcgcctgcgtgattgccctcggccatcacatcaccggcctgatgtcgaaccataacccgctggctcatgagctgatcggcgcctccgaactggccggcgaccgcgcatggcgtctgccgctggccgacgagttccaggatcagctggagtccaactttgcggatatggcgaacatcggcggccgtcctggcggcgcgattaccgctggctgcttcctgtcacgcttcacccgcaagtacaactgggcacacctcgacatcgccggtaccgcctggcgttccgggaaggccaaaggcgcaaccggtcgtccggtggcgctgctgtctcagttcctgctcaatcgtgcgggttttaacggcgaagagtgattgccgtctgatgcccggtggcgttacgcttaccgggcctacggaaagatgccgtttgtaggccgggtaagcgtagcgccacccggctttgcatttaaatccacaacaagaagccccatatatgaaaaacgcaacgttctatcttctggacaacgaagacaccgtcgacgagctcagcgccgtcgaacagctggtgtgtgaaattgccgcagaacgttggcgcaacggcaagcgcgtattgatcgcctgtgaagatgaacagcaggctattcgcctcgacgaagcgctgtggacgcggccgccggagagctttgtgccgcataacctggcgggcgaaggcccgagaggcggcgcgccggtagaaattgcctggccgcaaaagcgcaacagcagtccgcgggatattcttatcagcctgcggctaaactttgcagattttgccaccgctttcacagaagtgatagactttgtcccttacgaagattctttgaaacaactggcgcgcgaacgctataaagcgtaccgcatggctggtttcaacctgaacacggcaacctggaaataatggaaaagacatacaacccacaagatatcgaacagccgctttacgagcactgggaaaagcagggctatttcaaaccgaatggtgatgaaagccaggagagcttctgcatcatgatcccgccgccgaacgtcaccggcagtttgcatatgggtcatgccttccagcaaaccatcatggataccatgattcgctaccagcgcatgcagggtaaaaacaccctgtggcaggccggtaccgaccacgcgggtatcgctacccaaatggtggttgagcgtaagattgccgctgaagaaggtaaaacccgccacgactacggccgcgatgctttcatcgacaaaatctggcagtggaaagcggaatccggcggcaccattacccgccagatgcgccgcctcggcaactccgtcgactgggagcgcgagcgcttcacgatggatgaaggcctgtccaacgcggtgaaagaagtcttcgttcgcctgtacaaagaagacctgatttatcgcggcaagcgcctggtgaactgggatccgaaactgcgcaccgccatttccgacctcgaagtggagaaccgcgaatcgaaaggttccatgtggcacatccgctatccgctggccgatggcgcgaaaaccgctgacggtaaagattacctggtggtcgccaccacccgtccggaaaccctgttgggcgataccggcgtggccgttaacccggaagatccgcgttacaaagaccttatcggtaaattcgtggtgctgccgctggttaaccgccgcattccaattgttggcgacgaacacgccgacatggaaaaaggcaccggctgcgtgaaaatcaccccagcgcacgactttaacgactacgaagttggccgccgtcatcagttgccgatgattaatattttgacctttgatggcgacatccgcgaaagcgcggaagtctacgataccaaaggcaacgaatccgacgtctattccaacgagatcccggctgaattccagaagatggaacgttttgccgcgcgtaaagcgatggttgccgccgtcgacgcgctgggcctgttggaagagatcaaaccgcacgacctgaccgtgccttacggcgaccgcggcggcgtggttatcgaaccgatgctgaccgaccagtggtacgtccgtgcggacgtgctggccaagccggcagtcgaagccgttgagaatggcgacattcagttcgtgccgaagcagtacgaaaacatgtacttctcctggatgcgcgacattcaggactggtgtatttcccgtcagctgtggtggggtcaccgcatcccggcatggtatgacaacgatggcaacgtctatgttggccgcagcgaagacgaagtacgtcaggaaaacaacctgagcgcagacgttgccctgcgtcaggacgaagacgtccttgatacctggttctcttccgcgctgtggaccttctccaccctcggctggccggaaaacaccgacgcgctgcgtcagttccacccgaccagcgtgatggtgtccggcttcgacatcatcttcttctggattgcccgcatgatcatgatgaccatgcacttcatcaaagatgaaaacggcaagccgcaggttccgtttaagaccgtctacatgaccggccttatccgcgacgacgaaggccagaagatgtccaaatccaagggtaacgtcattgacccgctggatatggttgacggtatcaccctgccggagctgctggaaaaacgtaccggcaacatgatgcagcctcagctggcggaaaaaatccgtaaacgtaccgagaaacagttcccgaacggcatcgagccgcacggcaccgacgccctgcgtttcaccctggcggcgctggcctctaccggccgcgacatcaactgggatatgaagcgtctggaaggttaccgtaacttctgcaacaagctgtggaacgccagccgcttcgtactgatgaataccgaagatcaagattgcggtttcaacggcggcgagatggtgctgtccctggccgaccgctggatcctggctgaattcaaccagaccgtgaaagcgtaccgcgaagcgctggataacttccgcttcgatatcgcggcgggcatcctgtatgagtttacctggaaccagttctgcgactggtacctcgaactgaccaagccggtcatgaacggtggcagcgaggcagagctgcgcggtactcgtcatactctggtgaccgtgctggaaggtctgttgcgcctggcgcatccgatcatcccgttcatcaccgaaaccatctggcagcgcgtgaaggtcatttgcgggatcaccgcggacaccatcatgctgcagccgttcccgcagtatgaagcgtctcaggttgatgaagcggcgttggccgataccgaatggctgaaacaggcgatcgtcgccgtacgtaacatccgtgcggagatgaacattgcgccaggtaaaccgctggaactgctgctgcgcggctgcagcaaagatgccgaacgtcgtgttaacgacaaccgcagcttcctgctgaacctcgcgcgtctggaaagcatcaccgtgttgcctgctgatgataaaggtccggtttccgtgaccaagattatcgacggcgccgagctgctgatcccgatggcgggccttatcgacaaagaagccgagctggcgcgtctggcgaaagaagtggcgaaagtcgaagcggaaatcggccgtatcgaaagcaagctgtccaatgaaggctttgtggcccgcgcgccggaggcggttatcgccaaagagcgtgaaaagctggaaggctacgcggaagcgaaagcgaaactgattgaacagcaggcggtgatcgccgcgctgtaatcctcccgccccttatcccatccggtaaggggcgttattttatgaaagatccccgcttgcactctccccgcccgcagtgttattaacaacatcatccgtcattattatgtaatgagtcttcaaatgaatacgagcgcaaccctaacgctatccctgcgccgcattacggccactgataatccggcgattgccaatgttatccgccaggtctctgcggaatacggtctgaccgccgataaaggctatacggtcgctgatccgaatctggatgaactctatgagttgtatagccaaccgggctccgcctattgggtggttgagcaaaatggcgaagtggtcggcggcggcggcgtggcaccgctctcgtgtagtgagtccgatatctgtgagctacagaaaatgtactttatgtcctcggcgcgcggcaaagggctggcgaaaaagctggcgctgatggcgatggattacgcccgcgagcagggttttaaacgctgctatctggagaccaccgcttttttgaaagaagcgattgccctctatgagcatctcgggtttgaacatatcgacgagccgctgggctgcaccggccacgtcgattgcgaagtgcggatgttgaaaacgctgtaacgcagcgctaccgtgggcctccccggtagcgctgcgcttaccgggctacaaggtccgctacggcgccgtcggtacgccgctgtggaagcggaactcgggctccgggcggagaatcaatgccgcttccgcctcgccaagctggcgcacccgctcgctgatatcttcccccgctatcttctgcgccaggtccaggtaatcctgataatgacgggcctcggagcgcagcaacgacagataaaacttctgtaaatcatcatccagccacggcgccagcgcggcaaaacgctcgcaggagcgcgcttcgatataagcgccgcaaatcagcttatcgatcagcattaccggctcgtgcgatcgcacctcccggcgcataccgcgggcatagttgctggcggtgattttgacgtaagggatatcccgcgccagcatgatctcacgcacctgccagaagtggtgcagctcctctttgatcaacagaatcatgctgtcgagcaactggctgccccacgggtcgttggttcgcggcatggcgcttttgttgatccgtttatgcagagcgacaaaatccggctccggcccacggcgataggtaaagtcttcgtacggtttcagacattccagcagctcgtcggcgccgtctttatcggcgacgtagcggcgtaccagcagcatggcgttttgcgccgctttcagctcgcataccatatggtcggtcaacagcagcggcaggttttgcggtttccgggcttcgtcaatccacgcttgcggcgtaggacaatgaagaaatgctaaaatcgggagagtatttgcgggtaatccattgaagctccaggctataccctaatcaggacgggtatatacggcggcagacgccgccgtatccgttgacgacttagtggcgtacgccgttgtcgtcttcgtcaattaaatcttcgtcatcttcgccgtcatcgtcttcgccgttcgggtcttcgtagtaggtaccccaaccgtcgtactcaacgttgaatttttccgccaggttcatcagctgttccacctgggcgtcgatcagatcggcgttgagcgcgctttcgctcaggatatcgcagcagatcaccacttcgccttcttcgacttccagctcttcgggctcggtgacttcataacccatcttgaaggcctctaccgccactttttccaacgtttcgaaatcgtcggcagagagatgatgctcaatggtatacagcgcgtccggatcgctgccatcttccagcagctcttcgataatcagacgcgtttcctcacgctgttcttccagtagttccgggtttgccatggctcgttcctcataatgtgcggcagatactcctattgtcacataccgccgtgattgcctccaccttctgtgtaaaagatttctaactcggggttgcaaatgaatattcatacatataaagtgaattttaattcaatagtggcgtttgccaggtgagggaattatgtccgcgttatatcagaagcatttcttgagattactggattttactgctgcagaaattaccggccttgtcgacctggccgcgcaattaaaagccgataagaaaaacggcatcgaggcccagaaactgaagggcaaaaacatcgcgctcatcttcgaaaaagactcaacccgcacacgatgctctttcgaagttgccgcttacgaccagggcgcccgcgtgacctatctcggttccagcggaagccaaattggccacaaagaatccatgaaagataccgcccgcgtgctgggtcgcatgtatgacggtattcagtatcgcggctacggccaggagctggtggaaaccctggcggaatatgccggcgtgccggtatggaacggcctgaccgatgaattccacccgacacagctactggccgacctgctgaccatgcaagagcacctgccgggtaaggcatttaatgaaatgacgctggtctacgccggcgacgcgcgtaacaacatgggtaactccatgctggaagccgccgcgctgaccgggctggacctgcgtctggtggcgccgaaagcctgctggccggatgaaggtttagtggcggaatgcactgcgctggcgaaaaagcacggcggcaatattaccctgacggaagatatcgccgcgggcgtaaaaggcgccgatttcatttataccgacgtgtgggtatcgatgggcgaggcgaaagagaaatgggcggagcgtatcgccctgctgcgcgcctatcaggtcaataaagccatgttgcaattgaccggcaacccgcaggtgaaattcctgcattgtctgcccgcgttccacgatgaccagaccattctcggcaaacagatggcggcggagtatggactgcacggcggtatggaggtgaccgatgaagtctttgaatctccagcgagcatcgtcttcgatcaggcggaaaaccgtatgcacaccatcaaagcggtgatggtggcgacgcttggaaaatagccattaaccacggtagattcccggatagcgccaggcatatccgggctacccgttttaagccatcagtaccttcaccaccgctttgcgcaccttcgccggcgccccgacggcacatagcggtttatgcacttcgcctggataaaacaccacaaaatcgccctcgttaaggataacggttttctcctgcgcgccctcggcgaggaaggcgatgtctttgtccgccagccagtcaatctgcggctcgcctgcgggtaaggtgctgaaggtcatcccttcctgaccgcgaagtacaatttgaatatccagatagcgggcgtgatactcggcgcgacgctcggcctgcgcttcggtgctgtcttcagagatcagatagaacagattattgccgtcgatgtcgtgcttgccgagcggcgtcgacgcgctaacgtgggctttaacatgctcaatcgcctgacgcagcgcgtccggcagccaggattgcagatgatgaatattgccgataatcatagtagccctcaaatataaaacagcttttcatttttgttttatacgctgcttacgactgtcagaccacatttttatcgcggttttttgcgctggcgcagccttcgcaggcaaacgtttccctgattgtggattaatcgcttgattgctcatcaaagctgcgtataatgccagccgttttgccgggaggaaatatggtcaattgcgtacgacattgctgtgtcttaccgcgtctgaaagcaggcgctggcctggcgtttttctttccgttgctcaatgaattctcgaagccccttatttaaggggctttttttttgctcaggcgtcaggagataagcatggctaacccgctatatcaaaaacatatcatttccataaacgatctcagccgcgaagacctcgaactggtgctggcgacggccgcaaagctgaaagccaatccgcaacccgagctgctgaagcataaggttatcgccagctgtttctttgaagcctccacccgtactcgcctctcttttgaaacctccatgcatcgcctcggcgccagcgtggttggcttctccgacagcagcaacacctcgctcggcaagaaaggcgaaaccctggccgacaccatttcggttatcagcacctacgtcgacgctatcgtgatgcgccatccgcaagagggcgccgcgcgtctggcaaccgaattctccggcggcgtgccgattctcaacgccggcgacggcgccaatcagcatccgacacaaaccctgctcgacctgttcaccattcaggaaactcagggccgccttgagaacctcaatgtcgcgatggtcggcgacctgaaatatggccgtaccgtacattcgctgacccaggcgctggccaaattcaacggcaaccgcttctacttcatcgccccggacgcgctggcgatgccgcagtacattctcgatatgctggatgaaaaaggcatcgcctggagcctgcatagcgccatcgacgaagtgatggcagaggtcgatattctgtatatgactcgcgtgcagaaagagcgcctggacccatcggaatacgccaacgtgaaggcgcagttcgtgctgcgcgccgcggatctcgaaggcgcccgcgtcaacatgaaggtgctgcacccgctgccgcgcgttgatgaaatcaccaccgacgtcgataaaacgccgcacgcctggtacttccagcaggccggcaacggcatcttcgcccgccaggcgttactggcactggtattgaatagcgagctggcacaataagggggaatgagagatgacacacgacaataaactgcaagtagaagccattaaacgcggcaccgtgatcgaccatatcccggcccaggtcggcttcaagttgttgaccctgttcaagctgaccgaaaccgaccagcgcatcaccatcggcctgaacctgccgtccggcgagatgggccgtaaagatttgattaaaatcgagaacaccttcctgaccgatgagcaggtcaatcagttggcgctgtatgcgccggacgcaacggttaaccgtattgatgattacgaagtggtgggcaaatcccgcccgagcctgccggagcgcatcaatagcgtgctggtctgcccgaacagcaactgcatcagtcacgctgagccggtttcgtcgagtttcgcagtgaaaaaacgcgccgatgacatcgcactcaaatgcaaatactgtgaaaaagagttttcccattatgtggtgctggccaactaattgcggttggtattaataccggccctccctataatggctacgacctaattactgcagttcatctggagatattatgagcaaaactattgcgacggaaaaggcaccagcagctatcggcccatatgtacaaggtgttgatctgggtagcatgatcatcacttccggccagatcccagtagacgcgaaaaccggcagcgtgccggaagatgtcgccgcgcaggcgcgtcagtccctggacaacgtaaaagctatcgttgaagccgctggcctgaaagtgggcgatatcgtgaaaaccaccgttttcgtgaaagatctgaacgatttcgccaccgtgaatgccgcgtatgaagcgttcttcaccgagcataacgccactttcccggcgcgttcctgcgtagaagtcgcgcgtctgccgaaagacgtgaagattgagattgaagctatcgcgatccgtcgctaagcgcttctctaccctcacccccggacgcttgcgtcatccacggggtgagggaaatgccctattttatcttcgttgcccgcagcagtttctccagcggatagaccgccgcaatcaccagctcatcctgggttttcgccgccgtatccagttgcgcctggattgaggcgtactctttatcgtccagcgttccctgccgcgccaccagatcggtcaagcgcagcccgagactcgccagcttatcaacctgctgcaccaccggtttaatcgccgccagctgatagttattgtcggtcagcgccagcgcatcgccgctgttgttctgccagcgggtaaagacgtggcgcagcgcatcggcgctctcagcatcctcggcatcgctgatcagccgctccgcccactggttcaggctgcgtacggtgtcgctctccgccggcagcgcatcggccagccggttcagcggttcaaattgatggtaattgttcgcctggaacttgagatgctgacgggtgtagtaatgcgccggttccagcgcctcggcgagaatctgcaacgccagcgtatggctgctgtttgccagtcgggtgaactgctccagctgctgagtatgctgctgcaggccgacggagaccgttgaccaactgtccatcgcctgcaggcgctgatacatattgtcgctgtctttgacgtcctcggccgaccacagacgctccgccaccgcaaaagcgcgcggccacagcttgatatcgatgaccggcgcggcgacgttttccgcccacaacgccgcctcgccgccgagcagattcttttgttgctgcgcgtcgggcaacgtcggctgaataccctgcggtacggcatccagccgcttgccgtcaatgggataacgggtgttgccaagcaggaagtagcctgcgagcttgtcatcgttaatggttagcaccgggcgggtctcgcccatccaggaatccacgcggaacgtgacctgattgtcgccgagccattcaatctcctgcacggcacgtcgtgatttccctttaaaatcaataaacccccgccagccgctatcgccttttaccagcgtaaagctgccctcaaccgcgctgcccttcaggcgcggcatcgaaaactgccagctctgggcgctgtcgttatcggtaatcctatccacgccgttgagcccctgcgggataatctcattacgatagtgataggcggtgtactgcggctggtcgaggtaaaaaccggtggagagaatgccgcgatagccgtgtttggcgacgtcgcctaatgcgtcctgcccctgccaggactgaatcagaatgctcttcggtaaatcagggtggtagatttcatcccagccgaccatctgccggtgatgtttttcgagtaacgtctccaggcgccggttgaagtacgcctgtagcgcgtggctgtccgccagccccttctctttgaggaatttctgaatggccggattggcgcgccactggctgtcatcgacttcatcaccgccgatatgcagatacggatcggggaagatagccgccagttcgctgaccatcgcctcggcaagcgcgtaggtggcctcttttgttgggtcgagtaccggttttagcacgccccagtggcgctccatcgcgtaaggccccggcgcgctcatcagttccggataagccacggcgatcgccgaggcgtggcccggcatatcgatttccggcaccacgcgaataccgcgttcggcagcgtagcgcacaatgtctttcatctgcgcctgggtataaaacaggccgtcgctggcctgctgttgcagcttcgaatagcgtctggaggcgaagcgccagccctgatcgtcggtcagatgccagtgcagtacgttaagcttcgccgccgccataccatcaatctgccgtttgatcgccgacagcggcataaagtggcgggcggaatccagcagcagtccacgccacgggaagcgcggcgcatcgtcaatggtgacataaggaatggtggtgccgtcagggccgttttgtaccagctgtagcagcgtttccatgccgcgcagcgcgccaaaacgcgtattggctttcagggtcgcgccttcggcgttaacggttagctgatagctttcgtcgctatcaggctgcggcaggaaaggcactttcttactgacgatcacgttaatagttgggctttttgccggcgccgtctgcggctgtagcgtccagccggtttgccgcgcaagacgttcacgccagcggtttgccgcctcgcccagatcgtcgccgctgacgttgatcgtcagctgattatttagcgccaacgcccctgcgcctgtgggcgctccacatgggcgggccacggcatcagcggcagatcgcctgccggggcggcaagcgccatgctgctcagtaatattccgctggtcagcagactgtaacgcacggtgttaatcatcaatgttcctttttatgacgggccaaaaaaagcaaaacattgggttaacatgcgcacaaaattgcgtcaatacatggcgatgacgggcttcacaacttgatgagatttaagagaaataccggtaagcccctctgccgaacggcaaaggggcgaagccactactgccagccgtagcggcggctgtagaagcctttaacggtctgggtcaacaccatgtaacccgccagaatcgccaccagccacgggaaatagctgagcggcagcgcctgcagctgcaggtagcccgccagcggcgagaacggcagcgcgatacccaccgccatcaccaacagcgtcatcgcgaacagcggccacgcggcgcggctctggacgaaaggaatgcggcgggtacggatcatatgcacaatcagcgtctgcgacagcagcccttcaataaaccagccggactggaacagggtctgcatctcgacgctgttggcgtggaacacccaccacatcagaccaaaggtgaggatatcgaaaatcgagctgattggtccgaagaagaccataaaacgcccgagatcggccggattccagcgctgcggcttacggacctgctcatcgtcgacgttatcaaacggaatcgctacctgggagacatcatacagcaggttctgaatcaacaggtgcagcggcagcatcggcagaaacggcaggaaggcgctggccaccagcacgctgaagacattgccgaagttggagctggcggtcattttgatgtacttgagcatgttggcgaaggtgcggcggccttcgataaccccctcctccagtaccatcaggcttttttccagcaaaatgatatccgccgcctcgcgggcgatatccaccgccccgtcaacggaaatgccaatatccgccgcacgtaacgccggggcgtcgttaataccgtcgcccataaagcccaccacgtggccttcttgtttcagtagcgtcacgatgcgctctttatgcagcggcgccaggcgcgcgaacagcgtggtgcgtttcgccagcgccgccagttcgtcgtcgctcatggcttcaatctggctgccaatcaccacttcgcccgcatccagccccacttcatgacacactttcgccgccaccagttcactgtcgccggtgaggattttcaccgtaatgccgctggcctttaacgctttcaacgccggggcggtagtctctttcggcggatcgaggaaggcgatgtaaccttcgaggatcaggtcggattcatccgcacgctgatagtcgccttcccgcgccggcaggtatttggtcgccaccgccaccacccgcagcccctgacggttcagggtatcggtcacccggcggatacggcgcagcatggtgtcgtccagcggtacgatttcaccgttgtaacgcacctgagtcgagacgttgaggatctcctgcagcgcccctttacagatcagctgatgcgcgtcgtcctgctcttttaccaccaccgacatgcggcggcgttcgaagtcgaacgggatctcatccaccttctgccagcgctccgcgagaccgcgagcggcatccagttccacgccttccagcaccgcggtgtcgagcaggtttttcagcccggtctggtaatggctattgagccaggcggtgtgcaggactctctcgctggatttaccggaaacatcggtatggttctccagcacgattttatcctgggtcagggtgccggttttatcggtgcagaggatatccatcgcgccaaagttttgaatggcgtcgaggtgtttgacgattaccttttgttttgacagcttcaccgccccgcgcgccagcgtcgaggtgacgatcatcggcagcatctccggcgtcaggccgaccgccaccgacagcgcgaacagcgccgcttcccaccagtcgcctttggtgtagccgttgatcaacagcaccaccggcgccatcaccagcataaagcggatcagcagcatgctgacccggctgatgcctttctgaaaggcgtttggctcgctttcctgctcgctgacgcgcccggcaagctggccgaaccaggtgttgccgccggtggcgtagacgatggcctgcgccgagccgctcaccacgttggtcccataaagcacagggtgtcgcattccagcggattggtttgtagcggatcgcgggtgcgcgcgattttttcaaccggcagcgattctccggtcagcgaggcctgagcgacaaacaggtcgcgcgccacaatgatgcgcaggtcagccgggatcatatctcccgccgacagcctgacgatatcgcccggtaccagttggtcgatgggcagttcgagccagcggctctcgccctgctcgttgatgacccgcagcaccgtggcggtattgctgaccatcgccttcagcgcatccgccgctttggtcgagcgcgcttcctggatgaagttaagtagcgtcgagatgccgaccatcagcgcgataacgcctgcggcgaatagatcttcagtggaataggagacgatgccgagcaccgtcaacagcaggttgaacgggttgcgatagcaggtccacagatgaacccaccacggcgacggcttctgcgccgggatttggttatcgccgtgcagggcgattttcgccgccacttcggtgtcgttcagcccttcagggtggctatcgaacgcgcgccagatctcctgctcatccatggccgccacgtccaggcagcgcttgccgagtgaatccgggatcggcgcgctggccagattgcgggcgtcgggcagcggatcgcgctggatcaaacgatgtggtaaatggcggctaagctgcgcgaacagctgccgggtgaaatttttcagcataaacagtccctccgcgctcgcgcgagcgaacgcagcgttgccaacaggcgtggcaaagccttacctgtcaggcattatttttatagggcagggacatcgtggacgtcactgctttacgctttccggtaaagcagtgctaaacaggcttaccggaaagaaaggttgctccatcgaggatgaggagtgggatcggggtccataaaattctccggtaagtgactcaagacggcgcggagtataccgcgaccaggaaactatttgtggctattatggctatcataccgcccggcaactaaaccagacatcaaccagtctttgctcattgaggattcgttgagtagcattagactcactcaaatcggacgatggcgagaacctcgtatgcaaaaccggctaacaatcaaagatatcgcccgcttaagcggcgtcggaaagtcgacggtgtcgcgcgtgctgaataacgaaagcggcgtcagcgagcgcacccgtgaacgggtggaagcggtgatgcagcaacacggtttctcccttcccgctccgcccgcgccatgcgtggtcagagcgataaggtggtggcgattatcgtcacccgcctggattcgctgtcggaaaatttagcggtgcagaccatgctgcccgccttctatcagcagggctacgatccgatcatgatggaaagccagttttccccggcgctggtggaagaacatctgggcatgctcgcccggcgcaatatcgacggcgtggtgctgttcggctttaccggtattcgcgaggagatgctcgcgccgtggcgcgaaacgctggtgctgctggcgcgcgacgctcccggtttcgcttcggtgtgttatgacgatcatggcgcgatcaagttactgatgcagcgtctctatgagcgcgggcaccgccatattagctttctcggcgtgccgcacagcgacgttaccaccggggagcgccgtcatcaggcgtatctcgatttctgcgcgcaaaagaagctcacgccaaccgctgctttgccgggactggcgatgaagcagggttatgaaagcgtcgccagcgtgctgactcccgagacccgcgcgctggtctgcgccaccgataccctggctctcggcgccagtaaatatctgcaggaacagcgcattgacaccctgcagctcgccagcgtcggcagcacgccgctgatgaagtttctgcatccggagatcctcaccgtcgatcccggctacgccgaagccggacgccaggcggcacaacagttgatcgaccagatcgccggccacgccgaacccgccaaatcgtcattcccgctgccctgaattaatctcgttcgggcgatttatgtgatcttcgccgagtttcgggaacgttcccattttgcattcccaacggaacggttaggatgcatgcaaggtaaaaacggcatctctcccctctgtttttgaggcttcatcatgagcaaagtaaaccagcaggacatcgataaactgatcgaactggtgggcgggcgcggcaacattgccaccgtcagccactgtattacccgtttgcgctttgtgcttaacgatccggccatcgccaaaccgaaagatattgagcagttgcgcatggtgaagggatgcttcactaacgccgggcagttccaggtggtcatcggcaccgaagtcggcgattactataaggcgctgctggccaccaccggtcaggcgtccgccgacaaagagcaggccaaacaggccgcgcggcaaaatatgaagtggcacgaacggttgatctcgcactttgccgagatctttttcccgctcctgccggcgcttatcagcggcggtctgatcctcggtttccgtaacgtcatcggcgatctgccaatgagtaacggccagacgctggcgcaaatgcacccgtcgttgaaaacgatttatgacttcttgtggctgattggcgaggctatcttcttctatctgccggtggggatctgctggtcagcggtgaagaaaatgggcggcacgccgatcctcgggatcgtgcttggcgtcacgctggtctctccacagttgatgaacgcctacctgctcggccagcaggtgccggaagtgtggaacttcggcctgtttaccattgcgaaagtcggctatcaggcgcaggtgatcccggctctgctggcggggctggcgctgggctttatcgaaacacgtctcaagcgcattgtgcctgactacctctatctggtggtggtgccggtgtgctcgttgattctggcggtgttcctcgctcacgcttttatcggcccgtttggtcgtctgattggcgacggcgtggccttcgcggtgcgccacttgttaaccggcagcttcgcgccgatcggcgccgcgctgttcggcttcctctatgcgccgctggtgatcaccggcgtacatcagaccaccctcgctatcgatatgcagatgattcaaagcatgggcggcacgccggtatggccgctgattgcgctgtcgaatattgctcaggcgtcggcggtggtcggcattattattgccagccgtaaacagaatgaacgcgaaatctcggtacccgcggcgatctccgcctatctcggggtcaccgaaccggcgatgtacggcatcaacctgaagtaccgcttcccgatgctgtgcgcgatggtcggatccggcctcgcgggcctgctgtgcggcctgaacggcgtgctggcgaatggcatcggcgtcggcggcctgccgggtatcctgtcgattcagccaagctactggcaggtctatgccacggcgatggccatcgccgtggtagtgccgattatcctcaccaccgtggtttatcaacgcaagtaccgtcagggcaccttgcagattatctaacgtcttctttcggggcgccgcttgcgccccttatattcgcaggaacgtaatatgaatacccttccccgctggtggcaaaacggcgttatttatcaaatctacccgaagagttttcaggacaccaccggcagcggtaccggtgatttacgcggcgtcaccgcccgtctcgactacctgcaaaagctcggcgtcgacgctatctggttgacgccgttctacgtctcgccacaggtggacaacggctatgacgtggcgaactataccgctatcgatccctcttacggcacgctggaggatttcgaccaactggtcgccggagcgaaagcgcgcggtatccgcatcgtgctggatatggtgtttaaccatacctcgacggaacacgaatggttccgccagtcgttaaataaggcgagcccgtaccgccagttctatatctggcgcgacggcgagccaggaacattgccgaataactggcgttcgaaattcggcggtaacgcctggcagtggcatgcggaaagcgaacagtattatttgcatcttttcgccaccgagcaggcggatctcaactgggaaaacccgacggtacgcgccgagctgaaaaaagtctgcgagttctgggccgatcgcggcgttgatggcctgcgcctcgatgtcatcaatcttatctccaaggagcaggacttcccctccgataccgttggcgatggacgccgtttctacaccgatggcccgcgtgttcacgagttcctgcaggaaatgagccgcgatgtctttacccctcgtcacctgatgaccgtcggcgaaatgtcttccacttcacttgaacactgccaacagtacgccgcgctggacggacgcgaactgtcgatgacgtttaattttcatcacttaaaagtcgattatcccggcggtgaaaaatggaccctcgcccgtccggactacgtggcgctgaaagcgctattccgccactggcagcaagggatgcataaccgggcgtggaatgcgctgttctggtgtaaccacgatcagccgcgcatcgtgtcgcgcttcggcgacgagggcgagtaccgggtgccggcggcgaagatgctggcgatggtactgcacggcatgcagggcacgccctatatctatcagggcgaagagattggcatgaccaacccgcatttcagcaacattagtgattatcgcgatgtggaaagccataacatgtttatcgagcgcgcggcgcagggacaaagcccggatgaactgctggcgattctggccagtaaatcgcgcgacaatagccgcacgccgatgccgtggcacgatggcgagaacggcggcttcagcgatggagaaccctggatcgcgttgggtgataactatcgcgagattaacgtcgaggcggcgctggcggatccggaatccgttttttatacctatcagcagctgatcgcgctgcgaaaaaccacgccggtgctgacctgggggattatcaggatctgctgccggaccatccgtcactgtggtgttatcgccgccagtggcaggggcagacgctggtggtggccgccaacctgagccgtgagttccagccgtggcagccgccggagatgtccggcgaatggcgggcgctgattggcaactatgccgaaacgtccaaccgcccggcggcaatgacgctgcggccgttcgaagcggtatggtgggtgcaggcgtaaagcttttccccggtggcgctacgcccaccggggctaccggttcgtggggctggagattacgcgcggtcagcgtcaggaaggataacgctctcctgcggctgcgctgaggcgtgctcctctttggccttcagccgatcccaggcgcggaagaacggatagtagaccaccagcgaaatggttaaattcactacctgtagtacggtgccggaaatatggccgccggtcgccagatagccgctgatgaaaatcggcgtggtgaacggcagcgcgattccggccggcggcgccaccagcccggtcgccatcgcggtataggacacgatgaccagcagcaccggcgttaaaataaacggcaggaagaagtaggggttcatcaccagcgggatgccgaataccatcggctcgctgatgttaaacaacgctcccggcgcggcaattttccccagctgtttcatctgctgactacggctgcgcagcaacataaaaatcaccagccccaacagcgcgccggtgccgccgggcgcaatccacaggtcgtaaaattgctgggtaatgatatgcgggatcggctggccgttctgaaaggccgtcaggttctctgacatattcgacagccacaccggctggataaataccagcacaatcgcgtcgccgtgcaggcccagcgtccacaaaataccgatcacaatcaccgaaataatcatccccggcaacgtaccgccgacgtgatgcatcggaataccgatcagggtggcgatcatgctgttgatgtcgccgaacggcgaggcctcaaccgccaggcgcagcgccagcaccaccgccagcacgcaaaaaccggggatcagggcgaggaatgatttcgccactgccggcggcacgccgtccggcatgcggataacgagattgcggctggcgaccaaacgataaatctctgtcgacagcagcgaaatgacaatggcgacaaacagcccctggctgccgaccatgctcaccgggatcacccctttaatcacctccgccgcgccgtgtaccggagtaaagagggtgttctgcgggatagtcatcacaaaggccaccagcgacatcgccccggcgctcagcgggtcgatagtgcggtacttctcagccagccgataggcgatgccgaagctggaaatcagcgccataatgtcgtaggtcgctttcaccgggtacaacattttatcgcgccagacctcgccaaacaggccgctcatcatgtcggcatagccggggatcggcaggtaggcgaaaatcaggaaaaacgagccaatcagcataaacggcatattcagaatgatgccatcgcgtaccgacaggacgtgcttttgcccggcgatttttagcgccgccggcatgacgtaacgttcaatccagcttgtattcgacatggtgtgctcccgagggaaatagcgatcagttaaattgcgtcagccattgacggtttattgttaacacttcatccagcagagcctgggcatcggtgacgttaccgaccagcgggttagccaccagcgccagcagcgcgctctcgcgacagccgtgtaccgcggcttcaatcgtcagccgttcaaaggccttcacctgctgcgtcaggccgttcatcgccggcggcagcgggccgaaagccagcggccgcgccccttgcgcatcaataatgctgttggtttccaccaccgaatcatcatcaaggccgtgaatcgcaccgttgttgcgggtgtttaccaccatctccacgcccaggttgttgtgaatcgcattgataagctcaacggccacttccgagtagtaagcgccaccgcgaaagctcagctgctctggtttttcttccagctgcgggtcggcgtacagcgcaaacagttcctgctcgaccttcatcacctgctcggcgcgggtgcctttggttttcgctgcggcgatctcttccgccagcatcgctggcgtcagccagaaataacgatgataagggcacggaatcgccttcagcgcgcggaggaattctgccggccacggcagttctttaatgttgttcatcgacagcgccttaccgtcgcagagcatatcgatcactttgccggtgacatcctcgcgcccctgtaacaccttatgcacccaaaccatatggttgagcccggcaaagcgcagtttcacttcagactcctgcgcgcccaacatcccgacgatcatgtgctgcatgttgatcggtacgttgcacaggccgatgatcttcgccttgctgtagcggctgaccgcctcggtgacgatccccgccgggttggtaaagttaagaatgaacgcgtccggcgccagctgttccactttgcgcgcaacttcgaggatcaccgggatcgtccgcagcgccttggcgaagccgccgacgccggtggtctcctggcccaatagatgatatttgagacctagccgttcatccgcggcgcgcgccgccagttgcccgacgcgtagctgcgtcagcacaaagctggcgccgcggatcgcctcatcgagcgtaaagtggacgctgaccgccacctgctccagccctttatgtttcaacatacgccgggccagcgcggcaatgatctcaaccttttccctgccggattcgacatccaccagcgccagttcggtgaccggaagctgttcataacgaacgataatcccttcaataagctccggcgtgtagctgctgccgccgccgataacggcgattttcagtgcttgcatagtgacctctattcgcattttcggcatgcagatcgccgcgcgcgatcgccaggaccgcacgtgagggtgataaaaatgggattagaaaattagcgttcgagcagtgccagcgctttatccagcaccgctgcgccgcgcatcatgccgtagtcggccatatcaatcaccgccaccgctttaccctgcggtgccgccagcgcggttagccgtccggcttcgtatttgacctgcggcccgagcaggatgacatcggcgttcggcagttcgcgttcaaattccgccaccgctacggcatagatttccagcgccagcgcgcgctgctgagcttccgctttcattttgttcaccagcatgctggtcgacatgcctgcggcacaacagagtacgattcgtggcattgcgcttcccctttgcgtgtttatcgcttcagccttcacgacctgcgcgactatattgttaatattgtgtgatagtgaaggctatatgaaaataattttcatcgatgtgatcgagactcaatttttgtgcattatttcctcatgtcattgcgaaatatcgacgccagacataggaaatatcctgcgcagatgctataaaaacggctattcactaagtgaaaaatattttcaattccgggtactgccaaagggaacatcaggatggatatcgtaggtcaactacaggatggattggtccgctttagcgctcaggagtcgcgcgtcgccgcctttattctggaaaatcttagctttaccgccagcgcctcgattgacgaactggccgccagcgcgggggtcagcccggccaccatcacccgcttcgcccgttcagtgggctgtgatgatattcgtgatttacgcaaacagctggcgcaggccagcgaacggcgcgccagctggctcacgccggatagcgccgccctgcccgtcgcctggcgcgacaaacttagcagcctcggcgatacgctaacccgccagctcggccacaccgccgaagcggcggtggagaagtgcaaatcgcgcctgctgagcgcccgcgcggtgcattgctttgcccttggcgcccaggatgtggcgctggcggcgctgcttcagcaccagttgctgccatccggtatcgcaattaatctctgccaggatgcggcgctgatgcgaatgaccgccagtacccttaatgacgatcacctgctgctggtgctggccaccgccgaagccaatgccgtattacagagcgcaacgctgcaggcgcgtacgcaaggggtgacgattatcgctctgaccccggaacagcacgcgctggccgatatggccagcgctattctcccctgcccgccaacccgcagcatgcccgctacgccctgctgctgcttgtcgatctgcttaacgatacattgattgcctgaatattctgcccgttcccttcacgatcgggcccaatttttgcttatattttaagcgcctaaatttacatttcacgccagcgcccatcatccgtactctcacctttttaccttgttctgggtcaataaaatcgcaaacatctttgatgcaaatcactacatatagaacttaaaatgctcctcggccctacatattgtattaatcgtctattatgtcaccatatcttgtcgttgttgggcggtgatgagatgtggataaaaagggccggatccgaaggcaaacgccgctagtcgtagtgtggcgcgcttttgggagaccttccgcctctgtggataacctgttctatatatggagtgatcatgacaccgcatgtgatgaaacgtgatggctgtaaagtgccgttcaagtcagagcgcattaaagaagcaattctgcgtgcagctaaagcagcgggagtcgatgacgcagactattgcgccaccgtcgcagaagtcgttagccagcaaatgcagggccgcgcgcaggtcgatatcaacgatatccagaccgccgtggaaaaccagttgatgtccggcccgtggaaacagctggcgcgcgcctatatcgaatatcgccacgatcgcgatatcgagcgtgaaaagcgcggccgtctgaaccaggaaattcgtggtctggtcgagcaaaccaactcatcgctgctcaacgagaacgccaacaaagacagtaaagtcatcccgacccagcgcgatctgctagccggtatcgtggccaaacactatgcccgtcagcacctgctgcctcgcgatgtggtgcaggcgcacgagcgcggcgagatccactaccacgatctcgactattcgccgttcttcccgatgttcaactgcatgcttatcgacctgaaaggcatgctgacgcacggctttaaaatgggcaatgccgaaattgaaccgccgaagtctatctctaccgccaccgcggtcacggcgcagattatcgcccaggtcgccagccatatttacggcggcaccaccattaaccgtatcgatgaagtgctggcgccgttcgtcaccgagagcttcaaaaagcatcgtaaaattgccgaagagtggcagatcccggatgccgaaggctatgcccgtacgcggaccgaaaaagagtgctacgacgcgttccagtcgctggagtatgaggtcaacacgctacataccgccaacggccagacgccgttcgtcacctttggttttggcctcggcaccagttgggagtcgcgcctgatccagcagtcgattctgcgcaaccgcatcgccggcctcgggaaaaaccgcaaaacggcggtattcccgaaactggtcttcgccattcgcgacggcctgaaccataagttcggcgatgcgaactatgacatcaaacagctggcgttagagtgcgccagcaagcgcatgtacccggatattctcaactacgatcaggtagtgaaagtcaccgggtcgtttaaaacgccgatgggctgccgcagcttcctcggcgtgtgggaaaacgagaacggcgaacaggtacacgatgggcgcaacaacctcggcgttattagcctgaacctgccgcgtatcgcgctggaagcgaaaggcgacgaagccgccttctgggcgctgctggacgagcgcctgctgctggcgcgcaaagcgctgatgacccgtatcgcccgtctggaaggggtgaaagcccgcgtcgcgccaattctgtatatggaaggcgcctgcggcgtgcgtctgaaagccgacgatgacgtcgcggaaattttcaagaacggccgcgcgtccatctccctgggctacatcgggattcacgagaccatcaacgcgctgtacaacaatcagcatatgtacgatagcgaagcgctgcgtgaaaaaggcatcgccatcgttcagcgtctgcgcgacgccgttgaacagtggaaggaagagaccggctacggcttcagcctgtacagcacgccgagcgaaaacctgtgcgatcgcttctgccgcctcgataccgccgaattcggcgtggtaccgggcgtgaccgaaaaaggctactacaccaacagcttccatctcgacgtcgagaagaaggttaacccgtacgacaagatcgattttgaagcgccgtatccgccgctggccaacggcggcttcatttgctacggcgaatatccgaatatccagcataacctcaaggcgctggaagacgtgtgggattacagctatcagcacgtgccgtattacggcaccaacacgccgatcgatgaatgctacgagtgcggatacaccggcgagttcgaatgcaccagcaagggctttacctgcccgaaatgcggcaaccacgacgccgcccgcgtatcggtgacccgccgggtatgcggttatctcggcagcccggacgcgcgtccgttcaacgccggcaagcaggaagaagtgaagcgccgcgtgaagcacctgggcaatgggcagattggttaagttctgcgcagggttctcaccctcaccctcaccctaaccctctccctcaagggagagggaacagttcgagcccggcgctggttttcccctctccccgtgggagagggccggggtgagggcatcagcccctggtagcccgggcgagcgagcgcagccaacgacgctgcagcggcaaatgagaagaggaaacaatgaattatcatcagtactaccccgtcgacatcgtcaacggccccggcacccgctgcaccctgtttgtctccggctgcgtccacgagtgccccggctgctacaacaaaagcacctggcgggtaaattccggtatgcctttcacaaccgggatggccgaccgcatcatcgccgacctcaacgatacccgcattaaacgccaggggctttcactctccggcggcgatccgctgcatccgcaaaacgtcgcggagatcctcaatctggtgcagcgcgtacgcgccgaatgccccggtaaagatatctgggtctggaccggctataagattgacgaactgaacgccgagcagatggaagtcgtgaacctgattaacgtgctggtcgacggtaagtttgtgcaggatttaaaagacccggcgcttatctggcgcggcagcagcaaccaggtcgtgcatcatttgcgatagcgtttagagccgtttattcgcctgatgataaacggccgctttctctcttttgccaatggcaataacgtaaaccaccaccacactatctcgtacttgatacaccaaccgataacctgacgccttaagcttgattttgtagcaatccggtaaatcgctcagcctggccgactccattcgcggattctgcacaatctgcaggagcttatttttgaactgttttttgaccgtctcgccaagcttctgccattcgcgccaggctcgtggatcaaactccagttcataggtcatccagactcaccttaacccccggccgtgggttttccagccgttcgcgaacggtgcgtaacaacgccgcttcgccatcactgatggtcatacttttcaccggcatgcggccattttccgcaatgtattgaaacagcaggcgtaccgcctccgttggtgtcatatcgagtttctccagcacggcataagcctcttttttgagtttatcgtccagtcgaacattgagcgtggccattatgcctccagaaaggggaattttgtaatgcagtatagcattacatttgaattacattcgaatctggaaaacgcctctcaaaaccggctgacgcactccatcgccaccgttttaaactcatcgaagctacgggtcgcggcaaggcggctcatggcgcgctcgcgcaggaaagtcacgaaaatatcgtagatcgccatcgcctcttcatactcgctcttgctgatagcgagcaggaagatgatatgggcggtttcgtcgccccaggcgataccctgcggggcgatcacggtatagaccaccgtctttttcgctaacaggccgagggcgtgcggcagcgcaataccgtcgcccagcatggtgctgacaattgcttcacgctcgaccactgaatcatgaaactccgcatcgacgaaaccttcctgctggagctgctgacacagctccgcaaacagcgtttgctgatctatcggcttatcgatcacccggaagtgggcggcatcgaagtatttattcaacatccacggacgggtgcgatccaccagcaccagcttgccaatctgatctaactggtaatcggtggggaacggcgcgatggtcaccaccggtttgtctttttcgccgatccgtaccgttgagataacaaaatcctcatcgatcgcctcccgctgctcatattcacgctgggaaatggtagcggcgatcgccaactgcggatatttacgctgcaggatcgcttcgatcatccgcaccatcgcattactggtatcgcacaccagcagtacgtgcggctggcgctggtagccgatgttgtagtggcgttccagcccgacgccaatatgcagcaccagaaagccgatttcgttttcgctgatggtataaggcgtgtatttgccccagctcgataccgcggcgagtgtcatatcccatgccatcggatagtgctgtttgatgttatcgagcagcggattagggatcattatctgatagcgcacgcgggtgatcatggttttaatgtgggtcagcagatcggcgtgcagctggtcgtcgtccagcaggttgtagttatactggctgttgatgtaacgcagaatgtaatttaccagcgcttcgtcatcgtcggcgctgatggtttccggatcgacatcctgtacctggcgggcggcgatatgcacgcacagccactcttcctcggcgggcgagaagggttttccggccaaccgctgtagctccccgccaaatcgcgcgccgcgtcgcggacgttttgcgccacatcttcggcgctaaaatcggccagcggatagccttcgctaacgcggcgtaccacgaccgcgccgtacaggcagataaagcgctcgccgacatcggtgaggcgaatatgatgccgggtgagcgtctcctgcagcaccggctccagttgcgcagggacatccgcttccagcgcctcggcgccgatcaacggattaatgccgccctgcagcgtcagctcccacagtaaatcggtcaggcaggcgcgaatcgatacctcgctgccgaacagcttcatgccgtggcgcgggcgggtttcaagagtaagctgataacgctggaaacgctcgcgcacctcgaccatatcattttgcagcgtggcgcggctgatgaaccactcatcggccagatcttccagcttgatggagaacgccgaggtcaggaaacgcaccagcaaaaagtggatgcgctcctgggcggtacgcggcacgtgctgcgtcttcggcgccgtctcctccagcgcctgaaaacgcgatcgatcgtcaatcttcagctgataaccgctaccgcggttgagcgtaaactgcgcgccatactgcgccaacagcgcattcagcgcggtaatatcggcgcgcacggtacgggtagaaaccgacagccgctgcgccagttcatcctgcggcagcgtttcatttcgcagcagggtgaagagttgcgctaagcgttggttgggaaatcgcatgtcagttccttgttgttacggctcagggttgggcggatatcaccatctgcgatgggctaccgaccggcgtgtagtctggggcaaaggttaatttgccatccttcggcgccacgctaaaacgggtaatattatcgctacgctggttcatgacgtacagccactgcccctgattatccagcgtcagcgtacgggggtaatccccacgcgtccagatatcctcctggtggctcaggctgccgtcagccagcacgctaaagtgggcgatgctgttatgcaggcggttggcgacatatagctgtttgccatcgttgctcaacacaaggcccgcggcaaagctggtgcctttaaactccttcggcagcgcggagacggttttgccttcgcgcagcaggccgctttgcttatcaagatgatagaaggtcagcgtcgacgcttcttcgttaatcagccacagaccgtcgccctttggcgtaaagacgaagtggcgcgggccggctcccggcgacgaggcagcgataaacggcggatcgttcggcgtcagcttaccgctggcgctatccagccggtactgatagatccgatccagcccgagatcggtggagtaaacaaacttcccactgggatcggcggcgatcatatgggcatgcgggccattgtgatcgctaatggcaaagctgccctcgacggccgccgccggacgttcagcgccagccggaccttcatcctgatgcacatccaccgcctcgcccaggctaccatcttctttcaccggtaacacggcggtgctgccgctaacatagttggccaccaacagatatttaccatccggcgtcagggagagatacactggcccggcgccgccagaggcaacctggttgagttccgtcagctcgccgttcttgtcaattcgccacgcctgcaccacgcctttttcgacttcactggcggcatacagcgttttgccatcgcgcgatacggttagctgcgcgacgttcggcaacgagctcaccagcgccttatcgcgcagggcgccggttttggcatcgacggtaaagcgatacagaccttcgccattaggattataggtgccaatccaggcgtagtgggtttgcgcggcggcgccggcggcaagcaaagacagtgaagcaacaagcaggtgacgagcggtcggcatggtaactccttgatggttcggtgggataggttgcccctcaccctttgaaggtaaggggcaagggtactacttcactaactgtttggtcatctccagcaactggcgcacatcggccgggcgggtattgccgctggctttatcgataatcgagctgtaaatatgcgggatgattttactcacgccggcatccagcgcgattttcaggatctcgctgtagttttccagatcgataccgccggtaggttccagccagaaatcgtgcgcggcgcaggctttggcgacggcttcaaactcggcgcggtgcttcaggccgcccatcgggaagtatttgatagagctgccgcccatatcttttaacagcgcgatggcggtttccagcggaacaacgccatccgccgcgccgctgctaagcgggccggttgagatcttcaccattcccggcgtgccggtcggcgagaccaggccattcaccacggtctcattctgcccgagcagcgcgcggctggtacccacgccggtgaagacctggttaacgtgctgcggctgcacctggcgagaaatctcgctcaccatcgccgactggtttggatcgcctgcgcccagcccgacggagagcgcgttatcaatcagcttcgcgtattcacgcatatcggccaccgcgctggcgacgtccggatagtttttggagagcacgccgaccagtacgtgaccttccgccgcgtcgtaaatttcacgggcgttgtctttgctgcccgccagtacgttcaggcacacgcggtcacggtaaaagtttggggtcagtttcatgcttttttctccttattcagaacttctgcgatgcggcgagcgaccacctccagctgctgcgcgttcacgctgcggacatcggcttcgataatgccttcattcgctttatagccgcggaagtaaatggcgtattcgccctgcttcagcgcgttaaccagatcgccggtattcacgccggtcgtcgcttcatcaaatttaatttcggcgcgggcgatatcgcggcccgcgctatcccacaccacccgcgcagtcacgccgttgagagtgttgagctgttcgataaacggcgtcatcttgtccaccatctgctgaccgctctctttggtcgccgtcaggtagtgttcaatggcgcaggtcaggccgagaatgccctctttacccactttcatcgcccggccaatccccatcgactggcgcttaacccactcgacgtactgcgttttgccgatgaccagcccgctggtcggcccttcaatcgctttcgcgccgctgtagataaccaggtcggcgcccatgcggtaatagcactgcaaatcttcttccgccgccgcatcgacgatcagcggcaagttatgctggcgcgccacttccgcggcctgcgcgacgttgagcatgcttttctgcacgcagtggtgggatttgatatacagaatcgccgcggtacgcggagtgatagccgccgccagctgctgggcagaacattcgttggcgtagcctgcttccaccagcttaccgccgcccaacgccaccatcgtgccaaccggcgcgccgaagttgacgttgtggcccttcggcaacacgatttcgttattttcaatcggagtaacgtgcaggttctccagcagccagtcactgtctttcaccagcaccgccgctaccgactgggcaatccccgccgacgcgcaggagacaacggtcgccccttccacatccagtagtttggcgatgtactcgccggttttattcaccaggtctttcatttcaaagtactggttcataccggccatcgcggcttcaaccacttccgggcgcggcgtggagacgcccagcgccgtcatccggccagaagtgttaataacttgttttaaatggtatttctcaaaaatcgaaggcatgttccgcgctcccttgttcggtcagatagcccttgcccgcgcgaatcgcggccagcggcaccagaatgttgtcagcctgcaggctctctttttcggcatctaccagcaacgtgggctgatgctgcaggctaaatagcgttaaatcggcatcgaagccctcttcgaggcgccctttacgcgtcagacgcagccctcggcggcgctgacggtcacgcagtcaatgacctgcggcagggtcatgccgatggcgaggaatttcgacatcaccagcgccagcgagcgcaccgggccgtcgatacggttacggcagtaaatatcggagctaatggtgtgcggcagaatgcccatcgcaatcgcccgccgcgccacttcaaagctgaaactggcggtaccgtggccgacatcgaggcgcacgccgcgctgcagagcgcgagtaatggagctgcgcagctcgccggcaggattcagaatgcggttcggcttgccgttatagcagtgggtaatgatgtcgccgttgctcagcagatcggcgatttcatcgaggttcggcgggttattgccgatgtgcaccatcagcggcagatcgccattttcctgctgaatggccttggcgcgcgccagcggcgtaatgccgttttcgccgacgacgctgctgctcatccgcgccttcaggccgacgataaaatcaggatgacgctgcaccgcctgcttcaccgcggcggcgtcgatattagccatattcgccagctcattctgcgcaatcagcccgacgcgggagatgttgagcaacgcataaacttccgtcgccgctttacgggtcagttgatagaagtcatcgacgtcgtcggcgccggtgctgccggcatcaatcacggtagtgacgccggtggcgatgccgacgctatccggttcatcgtgataaatcggtgaattcgggtagcagtgaacgtgagagtcaatccagccagcgctgacgtaaacgttgccgttcagctcaatggttttacgcgagggcgcgctaatctcgcccagcgccgcgattttcccgtcctggatggcgatatcagtcagggtatcgtcgacgaggcgcgcacggcgcaggagtaaatcaaacatagctatctcctgatgaaagagtgaatctgttgccggatggcggcgtaccgtcttatccggcctacaaatcgcgctgacttgcaggcccgataagcgcggcgccatcgggcgattagctaatcgcaatcgggaagatggaaccgaggatcatcgcgccgaggatggcgccgccagtgatcggtttctgccagatgtagaacagcagtgcgccaaccaaagaaccaattccgataggaatagacgccgtcatcgcactaaggatgatcaagggccgaggaagcggccggaggcgttacctgcccccatcattacgtcggcgccgtaggtggaatcgctctggttgatggtgaacttacgcgccagaatgatgatgtagccgactgccaggccgaggatcaggccggttgccagcgacgcggcgaagttcgccaccgggaagacaaagcccgcgccgagcagcagcgccggtacgccgaggccgataccggtctgaatggcgccgccgatatccagaatccccaccagcgaaccttcgatgatgcgggcgaacaggaagctcgcgccgaatgccgccaccgcgccgtacgcgccggtatcaatccctgccttcaacatcgccacgaaggccacttcgttaaaggcgccgatgccgtacagatagtacatgtgcgtcccggcgaagacgccggaggagagcaggccaacaaagatcgggaacgaccagtcggcataccaaaaacctttattctgttccattatcaggctcccgttacttgccgctgagtgagttgtggatcatgtccagccagttcggcacggtcagatggaaggattcgagcatcttcatgtcgaagccgcggaagaagccgctgaggacgaacaacgcgacaatggcgatcatcatcactttggttacccggttccagccgctctcttctacgcctttaccgatcaggatccccagtaccagacccggtacggcgttccccataatcagctgcgctgcgccgccgaaaatcgtcgcccagaagcctgattttttaccggcatcgatagccgccagccagaaaatcaccggcatcacggtgttcaccagcaggtttgccgccggaaccaataccttaacggcggtgacctgcagcgcttccggtacggaagaggcggtcaggttaaggaaggcgacgacgatcatgccgatgatgccgcaggcaatggccatttttttcggatcgtgtagcgtttcgccaacgttacgatttttcaccatcaacgccgccgcgccccagttcgggataatgcggtggtcaacgtcctgggtgaaggagcctgctgcaacggaagaggcccaggcgttaaagaagaagccaagaccaaaagagaagtgagaagccggatcgccttcacaggaattcagctcgcccaaggtacgaaacgccccatcccttgcgtggtgggcgcgtgaaacatgcgtgccgctccggcgcccacgccgacgccgaccaggccgccgatgatgagcgattttattaaaattatcaggaacatagtctgaccctttggtaacaatcaggtttgcgtgacgaaatccactttatcgagatcgatggcggtcacgttgacggtgacgtccagctccacgctgtaggtccgtcgttcacggcgcaaaaagatgaacagaaacgcctcttttcgtaccgcttcgcgcgcatgaacaaccgtcacgtcctgtggctcaatacgcagtaggatgcgcgatgatgatttcatcaccgcagcctgcacatggttaagggcatcggcgaaggcccgtgatttgctttcgcctttgcctgcaaccctcaccgtggtggtgaattgctctttcatacttatgcgccgtatttctttttccaggcttcaaccaggcgctcgcccagctcttctttatccatgaagccgaagcccagcacgttgcaaccttcgttgatggcggtgacgccctcttcaatagaacgcatgccgtattttgctttgtagccgtacttggtctgcgcggtgatagcgcctgcgccgccgctaccgcagaaggagatgccgaaagaggcgttttccgctttcatcatgtcgccaagtttcatatctgcagcaacgccagggacgaccactgcacgtgcgccggctttttctgcgcctgccgcgactttttgtcctttacccagacggtcgccaataactacggtgatttgttccatgttttgctccttacaggttttcttttgcgacttcgaagtggacggacaacaaccaggcctcttcatcaggcaggttgccgaactgtgcgaccacttcgcgggccagcatcattgaatcttcagaaatttcttcgaacagactggcatccacttccggtagcggttcgccgctgattgaccggtgggccatggcccgcacgtgggaagtcagcatttgctcctggacgtcgttagggacaatgtcgtgacggcttaacagggcgaatacctgctgtaacatcttgtcagccaggcgttcggtctgcgccgcctgctcccctacgtcgtttattaccgctccgttattcacttgtgttaccccgctgatgtctctggaatccaaagtagcgccgggggtcaggagtttgtagcgagttgttttccacttcgaagtggaaagggagaaggcttaggtgatcgactccacatattcgccggataaatgtaaaaacaggcgatatgacgtgatgcgcatcacaacaatgatcgaggtttagcggaaaacgaccgcagaaagaccggaaaaagaaaagggaaaaatgtgatgcgggtaggcttttaggcgggagacatcggctgacgcctcccgaaaacggcgattagcgatacttcttatggtaggtattgcgggtagttttgaagtcctccgcagcggcctgcgcctctttcagcttaccagcgtcagctaacttcagcgcaccgtcgatctggccgaccagcgtctccagaccgtggcggaaatctttcatctccgggctatcggccgctttgccttccagttttggcggcgtctctttctgcgcgtcaaccgcagcggtgcgcatcttattcagcgccgctttcagctcgccaatgtctgaggttttctgtaccacctgcaggttttccgcaagggtgtccatgtcttcgccaaggtcggcgaacgccgatgccgaaccgagcgcaaaagcagagacggccagcatcgctaacagttttttacgcattgctcacttcctttttattatgaagatatcaagcgggcgcggcaggacgcgcccggcacacaggtcattgaccggcgattttcatctccggcagcagcacggaaccacactgaatattgctgcgcgtttcgatatcgtcgccgacggtaacaatattacgccacatttctttcagatttccggcgatggtgatctcactgaccggatactgaatttcgccgttttctacccagaaaccggatgcgccgcgcgagtagtcgccggtcacgccactgacaccctgccccatcaattcggtgaccacaagcccggtgcccatctctttaagcatctttgcaaaactcaggccgcggccgttgatgcgccagttatgaataccgccggcgtggccggtgcttttcatacccagcttgcgcgcggagtagttagtcagcagccactgggtcagcacgccgtctttgatgatgtcgcgacgttcggtgcgcacgccttcgctgtcgaacggcgtggaggccagtcccttcagcagatgcggatgttcttcaatggtcagccactccggcaggatctgtttgccgagggagtcgagcaggaaggtcgatttacggtagaccgcaccgccggcaatcgccccgacaaggtggccaaacagcccggtggccacttcgttggcgaagataaccggcgctttcatcgtcgacagcttacgcggcgccaggcgcgacaaggtgcggcgggcacattcgttgccgacccactccggggtctgtaaatcgcctagggcgcgaccaatggtgtaggcgtagtcgcgttccatatcgccattttcttcggcaatcacgcagctggagagcgagtggcgagtcgaacagtagctctggagcatgccgtagctattaccaaaaactttaattccatagtggctgttgaagctgccgccttcggtattggtaatacgtttgtcggcctgcagggcggcctgctcggcgcgggcggccagctcgatggcttcatcgggggagacctccgccggatggaacaggtccagatccggggcgtcaaaggccagcagttctttatccgccacgccggcaaacgggtccggcgaggtgtaacgtgcgatatccagcgccgcctgcacggtacgggcgatagcgtccgggctcaggtcggtcgaagaggcgctgcctttacggttttgatgataaacggtgatgccaagcgcgccgtcgctattgaattcaacattctccacctcaccgtagcgggtgctgacgccgatgccggtggtcttgctgacggagacttccgcaccgtcggatttgcctgccgccagttccagtgccgtactaacggcttcttccagcgtcttacgctgctgtgcaacttgagagatgactttcattgctaatgccataatgtaagaaggagttaactgaagtctaacagagaaccgtttttcagtgcgcgccttaactggtaacattagcctcttttttaaggagcctgagatgacaaagcagcccgaagactggctcgacgacgtgcccggtgatgacgttgaagatgaagatgatgaaattatctgggtcagcaagagtgaaattaagcgcgacgcggaagaactgaagcgtcttggcgcggaaatggtagaccttggtaagaacgcgctggataagctgccgctcgataccgacctgcgcgacgccattgaactcgcccagcgtatcaagaaagaaggccgccgccgccagctgcagctgattggtaaaatgctgcgtaaccgcgacgtcgatccgattcgccaggcgctggataagctaaagaaccgtcataaccagcaggttgcgctgttccataagcttgaacaaatccgcgatcgcctgattgataatggcgatgatgcggtcgtagaagtattgaacctgtggccagacgctgaccgtcagcagctgcgctcactgatccgtaatgccaaaaaagagaaagaaggcaacaagccgccgaaatccgcgcgcctgatcttccagtatctgcgcgaactggccgaaaacgaaggttaattccccacgctcaccgccatctcccggatggcggcgcgttgcgccttatccgggctactccgttacggtgccggatggcggctacgcctattcggcctacgttcctcagcttcaacgcaagcatagcgccaacagggatgatcccggcgcatcgcctgagtcccctaatccccaccacgatactttttattgttctgtttcaaagctgaatcgttaaatcaaaaagcaatgtagatcacattttgtagtgataattaggcaagattcagcacagcaatacgacttttatcgcattcaacctcatcaaatcggccattttctcaccaggtgagacgcttcacattttaattacccccataccggtaaatttcatacgccaacgacacaatcgattcagcaaaaagggaataaaaatgaaaaaaacattggttatgacgacactcgccctgctggtttctggctcggccgcggcaaaaacatgggtgctgacggacgctgaagagggaatggataaaggaaactggcagatcagcagcgatcagctgaaggtaaaagaccatgcgttcagcattgagcaaaaagtcctgcacggcggtaagcaggaaggcagcaaaatcatcaccattcacagtaaagatggcctgactatcactctcagtccgacgcgcggcatgaacttactgcgtattgagggtttcggcagccggatgggttgggattcaccggttaaagaggtcgtcaacccggcctttatcaacctggaaagccgcaacgggctgggctggctggaagggttcaacgagatgatggtacgctgcggctatgaatggaccggccatccggtgaatgcggacgggcaaatttataccctgcacggcaaagcgggcaacacgccggcctctctggtggaggttgaggtggccgacagcgcaccgtatgaaatccgcatccgcgggctggtgaaagagagcactttcaaaaaagccgatctgcagaccctgaccgaactgcgctacgtcccgggcagcaacagcttcagcttacatgatgtcttaaccaaccatgccgactatccgcatgattatcagatcatctaccacagcaacttcggcacgccgattctggaagaaggcgcgcgcttcctcgccccgatgtccagcatcagcccgttcaatgattacgctaagggtgggttaaaaacctggcaaacctatcagggaccgaccaaagattttgacgagatggtatttaatattcagccgctagccgatgaaaaccatcagaccctggccgccgtggtcaacaaagcgggtgataaagggcctccattcagtttgatacccgtcagctgccggtcctgacgctatggaaaaacaccgacaccgtcaaacagggctacgtcaccggcatcgagccgggcaccagctacgcctatccggtgaccattgaacgcgaacaaaaacgcgtgaagcagctgcagccgggcgccagcgcgcagtttgatctgacctacaccctgctgcacgatagcgcccaggtggccgccgttgagcagaaaatcgcgcaaattcagggcgacaacaaagtcgcggagaacgagacgccgatcgccaaagagtaacagcgccgccagtcgaacgcccggagcggtacgccgcgccgggctactcccgtcccatcacctcgcgccctaaatcgcgggcaaactgctgatactgcgccgcatcgatcggctgcggatagctcaacaccagcagttcatgatcgtcgatcccttgatgataggtcggatggcggtgcgcccacgcattggcatgaaatcccatcgactggtaaaaacgcagccgcttatgggcgatctcgctggtcagcggatcgatttccagaatggtcagcggcgcgcgcgtcaggatctgcgccagcagctgtttgccatagccgcgcgaacgcagggtgtcatcaatcgccagatgttcgatataactataaccggcaaactgccagcagccgctcaggccaataaataccccgtcatcaaaccacgcttccaacgcatagtgcgggttgctcagcgcctgaagtttggcgacgctttcgcgctgttcgtgccacggaaaggcgcgggcgtacagcgcgtcaagcgtggcgaaatggggcgagtcggtagaaatgactttttcacaggtcagcatcacacaatccctggtggcgaaaacaaaactgccctcacgcggagggcagtaaccggaggcgttcgcgcttattctgccgcggccgctttttgcgccagtttatccagcagcttctgatgaatgccgccgaagccgccgttgctcatcaccagaatatggtcacccggatgcgcagttttcacgatcatgtccaccagcgtatcgacgtcggcgctccagtgcgccggctgtacgcaggcttccgccacttccgccacctgccacgggatatgctgcggctgtagcaggaagacctcatcggcgcggccgagagacggcgccagatcgtctttgcagacgcccattttcatggtgttggagcgcggctccagcaccgccagaatacgcgcggtgccgccgactttgccgcgcagcgcctgcagcgtcgcgagaatggccgtcggatggtgggcaaaatcgtcgtaaacggtcacgccgttggcttcgccgcgtagctcaaggcgacgtcgggcgttgataaagctgcccagcgcgttagcggcatccgccggcagcacgccgacatgacgcgccgcggcaatcgccatcaggccgttgtgcatattatgctcgccgaccagcgcccagttcacttcgccaactttttcgccgtcgagcagtacttcccactgcgaggcatcggcgttgagtttcttcgcctgccagtggccctgctcgcccaccagctcctgttcgctccagcagcccatcgccatcacctgcttcaggttgatatcgctctccggcagaataattttgcctttgcccggcacgatgcgcaccaggtggtggaactgtttctgaatcgctttcaggtcgtcaaagatatccgcgtggtcaaactcaaggttattgaggatcagcgtgcgcgggcagtaatgaacgaacttggaacgcttgtcgaagaaggcgcagtcatattcgtcggcttcaattacgaagaacgggctatcgcccaggcgtgcggaaacatcgaagttgcccggtacaccgccgataacgaagcccggcttatagccgcaggcttcgaggatccacgtcgccatcccggcggtggtagttttaccgtgggtaccggcgacggccagcacccagcggtcgcgcaggacgaagtcgtgcagccactgcggaccggacatatacggaatgttgttttccagcaccgcttcgacgcacggattaccgcgggtcatggcgttaccgataatcaccaggtccggctgcggatccagttggctggcgtcgtagccctgaatcagatcgatgccctgattttccagcagggtgctcattggcggataaacgttagcatccgagccggttacttgatgcccgagggaacgtgccagcattgccagccccccataaacgtgccacagattcctaaaatatgaatgcgcattcgttacttccctcattaatctgacccgcattttacccatatgtatgcccctgagaaatgcatttcaggcaaatctgcatttgctggcgcgattcacctgtgcgcagtttttttattatttgttaagattgttgcgttcgttttactcaacataaaaatgcagggaacgagttatgaaaacgttaggtgaatttattgtcgaaaagcagcacgagttctcccacgctaccggtgagctgactgctttgttgtcggcaataaaattgggcgccaagatcatccaccgcgatatcaataaggccggtctggtcgatatcctgggtgccagcggtgcggaaaacgttcagggtgaagttcagcagaagctggacctgttcgcgaatgaaaaattaaaagctgcactgcgcgcacgtgatatcgtcgccggtatcgcctcggaagaagaagatgaaatcgtggtcttcgaagggtgcgaacacgccaaatacgttgtgctgatggatccgctggatggctcctccaacattgacgttaacgtctccgtggggactatcttctctatctaccgccgcgtcacgccggtcggtacgccggtcaccgaagaagatttcctgcagccgggtaacaaacaggttgccgcgggttatgtggtttacggctcctccaccatgctggtctacaccaccggctgcggcgtgcatgcctttacctacgacccgtcactcggcgtcttctgcctgagccaggagcgtatgcgcttcccggagaaaggcaaaacctactccatcaacgaaggtaactacatcaagttcccgatgggcgtgaagaaatacatcaagtactgtcaggaagaagataaagagacccagcgcccgtacacctcgcgttatatcggttctctggtggccgacttccaccgtaacctgctgaaaggcggcatctacctgtatccaagcaccgccagccacccgcaagggaaactgcgtttactgtacgaatgcaacccgatggcgatgctggcggaacaggctggcggcaaagccagcgatggtaaagagcgtattctcgatatcatcccggaaagcctgcaccagcgccgttcgttctttgtcggcaacgaccacatggtagaagacgtcgagaacttcattaaagagttcccggacgcttaatttctgccttcccttcccgccttgcgggaagggagttccctgtcagcgattcaccgccccacccacgcgagtcaccgccgcattctggcgattttcccacagcaccgtcagcccgcgctgcagcgcaatgaagataaacagcaggatgccgatggcaatcttcgtccaccatgaactgagcgtaccgtcaaagttgatgtaggtctgaataagcccctgaatcgccacgccgaacagcgtccccagtaccgttccgacgccgccgctaagcagcgtgccgcctatcaccaccgaggcgatagcgtccagctccacgccgacgcccgccagcgcgtagcccgcctgggtgtagatagagaagacgatgccggcaagcgtcgccagaccggtcgacagcatatagatgcgaatggtggtgctacgcgtagaaatgcccatcaaatttgccgacgtggcgttgccgccgatcgcgtagacctgattgccaaagcgggtacggtgggcgaggaaaattcccagcaccaccaccagcagcatcagcagccccatcgcgctcaggcggccgccgccggggatggtccacgccagcccggacagagtgtcatacagcgggtggttaataggaatcgactcttccgagaccagatagctcacgccgcgcaggaaaaacatgccggcgagggtgatgataaatgccggaattttcagcgcatcgatcagcaatcccataaacgcgccgaaggcgcagcccattaccagtaccagcggaaaggccagcagcggcgagatcccccaaaagccgatcgctttggcaagaaacacgccggtgaaggcaatcactgacccgaccgacagatcgataccgccgctgaggatcacgaaggtcatgccgacggcgatgatcccaaggaaagcgttatcggtcagaatattgcaaatcactcgcgtcgaagcaaaacccggaaactgggtcaggcagtagagatagcccagcacgaataccgcgagggtgatcatcaaaggtaaattacgttttatcacggccgcgtacccctttcagtagaccgataaagcgcggcgactgaacgatcagtacgcacagcaccaccaccgctttcaccacctggttgagctccggcgggaaaccggagagtaaaatcccggtgttcattccctggataatcaacgcccccaccaccgacagcagcagattaaagcgcccgcccattagcgaaccgccgccgatcaccaccgccaggatggcgtccagctccagccataatccggcgttgttggcgtcggcgccgcggatatccgccgcgacgataatgccggcaatcgctgcgcagatgccgcttagtacataggccagcatcaccacgatgcgggtattcactccggcattttttgccgcgcggatattgatccccaccgcttcaataaacatgccgagcgcggtccggcgggtaaacagccagaacagcagtagcgttgcgatggcgataatcaccggcgtcggcagcagcaacagggagccgctgccaagccaggaaagcgccggcgaatcaaaggtgacgatctgcccggaggtaatcagctgcgcgacgccgcgcccggcgaccatcaggataagcgtggccacgaagggctggatcttcagcacggccaccagaatgccgttccacaggccggccagcgcgcctgcacctaacgcggcgagcagcaccaccggcaggctgtgcccggcgacggtcatcgaggcggcggtcgccccggcgatagccatcaccgcgccgaccgacagatcgatgccgccggtggcgatgaccagcgtcatgccaatcgccagcagcgccaccggcgccgcacggttgagaatgtcaatcgggctgccaaacagccgtccatcctgcaacagcacctggaagaaatgcggcgccaccaggctatccaccgctaataccagcaggagagcaataatttgcggcatccctttcggccagcttaagcgccgttttggctgtccgctttgtggtacagttctgggcatcatgctgggctccttatgccgcaatcgcgttcatgatcgccgggaccgatagctcggcaagcgggatttccgcaacctgctggcgatcgcgcatgatgatcacccggtcggcgtagcccaccagctcttccagttcggaggagataaccagcagcgccaggccatcggcgcagagggtttctatcaggcgaataatctcggcgtgggcgccgacatcgataccgcgcgtcggctcatcgaggatcaggaactggggtttggtcagcagccagcgcgacagcaataccttctgctgattaccaccggagagaaattcgatcggttgttcagcgctgggagtgcgaatgcctagctggcgaataaagcgttcggcgatctcatgctgctcacggcgtgggatcggccgcagccagccgcgctgcgcctgcagcgccagcacgatattttcccgcaccgaagcagcggcgatgatgccgtcggttttacgatcttccggacagaagccaatgccgaggcaggaggcctgatgcggcgagcgcagcgtttgcggcttgcccttgatccacgctttaccgctgtcggcgggcttgatgccaaaaatgacctccgccgtttcggtgcgcccggatcccaacagcccggccaggccgacgatctcgcccggccgcacctgcagagtaaacggcgcaatcgtgcccttcttgccaaaatcttcaaatgccgccacaggcttatcgctgagcagcgtgcgccctgcgcgctgcagtgcctgatggtccagctcgcgccccagcatcattttgaccagttcgatttgcggtagctcgcgggtctcccgacagccgacgaaaccgccgttgcgcagcacggtaatacggtcgctgacggcatagacctggtcgagaaaatgggtcacaaaaatcaggctgacgccgttatcgcgcagctggcgcatcagggtgaacaacatctccacttcctgagtgtccaggctggcggtcggttcatcgaggatcaagactttcgccgacaggtcgatggcacggcagatggcgacgatttgctgcatcgccaccgaaaagcggttcagcggttcgcgcacgtcgagcgagaagccgtaagaggccatcagcgcggtagcgcgtttttccatctctttgcgccgcagcaggccaaagcgcttcggttcgcggccaataaacagattatccgccaccgacatattcggcagcaggttaacttcctgataaacggtaccgatacccaactgctgagcgtgggcggtgtttttcggcgatatctgctgcccttccagccaaatcgccccgcgatcggcatgatacacgccggtgagcgctttaatcagcgtcgattttccggcgccgttttcgcccaacagcgccatgatttcgccgcgccgcaggctgaaattgacgttatccagcgccttcacgccggggaagaatttgctgagtccttcggtacgaaggatctcctggtgttggtcggtggtcatggttccccctgcatcacgccggatggcgctacgcttatccggcctacaaaagagcgaaatgtaggccgggcaagcgtagcgccccggcattttcatgaaggctcagtaacccatatttttcttcttctctaactcttcttttgccgtatccggcaggtagagggtcgatttggtcacggtcagcttctcaggcagggtgccatcttttttgtatttttccagtgcatcaaacgccggaccggccatattcggcgtcagctcgacgctggcattcgcctcgccggcgatcatggctttatagatatccggaacgccgtcgatagatccggtgaggatatctttgcccggcttcagtccggcctctttaatggcctggatcgcgccaatggccatgtcatcgttatgggcgtagaccatgcagatgttcttgccgttattctccgctttgataaagctctccatcacctctttccccttactgcgggtgaagtcgccggactgcgagcggataatcttgatgttggacgctttgccgatcgcctcggcgaagcctttcttacgatcgatagcgacgctggcgcccacggtgccctgtagctctacaacgttacacggtttgccatcgacggttttcaccaaccagtcgccaatcagttgtccttccagcacgttgttggcggtgacggtggtcatatacagcgacttatctttaacgtcgatcgaacggtcgaggaggaacaccgggatattggcctctttcgcttcttttagcaccggctcccagccagtcgccacgaccggcgcgataaagatcgcatccacgccctgggcaatgaacgagcgcacggctttaatctggttttcctgtttttgctgaccatcggcaatcttcagggtgatgccacgcttcgccgcttcttccttagcaacattcgtttcagccgcgcgccagcccgattcagagccgacctgcgaaaatcctacggtcaggttggcggccatcgccatagacgacatagctgccgaaaccgcggtgacgagaagtaagcgcttccacataagatgttcctcgtagggttattgttggttaaatgctcacctgcgaacaaactatagacaatccgttatgtaactgaatgcgttacatcacacttcgaaaaagtaaatgaaatgttaattagtgcgatttgtctgagctgagcggcgataaggcttcccgcccaacggcatgccctgcgccaatgacgaaaatttgtcttttaaatgagtgccgctcgcgcaactgaaaacggttacacaaaattattcagaatgtagctatctttatggattttagggttatcagatgaggagaaattcagacgcttcccccatagccaggcaaaaagaagcgaagacattcgatgtgagttggctataataccgggcacttgtttgccaaacatttttaaaggaaacagacatgagcttactcaacgtacctgcgggcaaagagctgccggaagacatctacgtcgttatcgaaatcccagctaacgcagacccaatcaaatacgaagttgacaaagagagcggcgcactgttcgttgaccgtttcatgtccactgcgatgttctatccgtgcaactacggctacatcaaccacaccctgtctctggacggcgacccggttgacgttctggtcccgactccgtacccgctgcaaccaggctcagttatccgctgccgtccggttggcgtactgaaaatgaccgacgaatccggtgaagatgccaagctggttgcggtaccgcacaccaagctgagcaaagaatacgatcacatcaaagatgtgaacgacctgccggaactgctgaaagcccagatcactcacttcttcgagcactacaaagatctggaaaaaggcaagtgggttaaagtcgacggttgggacaacgctgaagcggctaaagctgaaatcgttgcttccttcgagcgcgctaaacagaagtaattctgtttatccagcataaaaaacaccgcctccgggcggtgtttttgtatgggcctgttctggtttcagacggccaaaaaacaacgccacccgaaggtggcgttgccgttttcaattactggtctctgtccaaccagtttccgctctcaatctgcgcaaacccctcgacggagcgctggtagacatacatccacgcgctgccgtaaggcgtttggatcagatggcgcgcgtattcaccgcccttggtgcgcagcgcatccagctcggccagcgtcgatgcgtcgatacgatacacttcaccatgtactgtgccctcgcccggcaccgcgcctggatagtggcccaggctgtacagctgataatcgtcgacactatgagcgcccagcaactgggcgttggtcatccagtggctgttgccttgtttgcgtcgtaaactgccgtaaacaaatattcgcattgctaaaactcaaactgatagagcaaatcgagagcctggtctacgccagacaccgcttccatatatagcttaggcatcaggcgataacgcagggtaagcgtcgccaaagagtcgaagatgccgacgccgtattttacctgaagacctggcagcacatagccgctgaccaccacctgggaggagtcgcctaccccctgggtatccagcgccaaattgcttacgccaaacgtctcgccgattttacccacaacctgaccactttgtgcaacccccattccaataagcattgaggtcatcgccgcactatcgctctgttcgctgcctaaaccctgaccgcgtaacagataagaaagcgcttcctgctgcgacattgccgggtcggagaagatctcggccttcggctgatcggcagaaccggtgacgcgaacgccggcgatcacgtcgtcttcggtggcttccgggttacgaatcgcttcgatattgagcagcggctgatccggcggcccggagaacagcagctcgcctttacgcacgatcagatcctgaccataagcgtggaaacgaccttccggaatattgatctggccattgagccccagcccctgcttatcctgcgccactttcagatcgccggtcagacgcgctttcaggccgaaagcgtccagacgcacgttgttgccgacgtgaatcgtcaggttgctgttgatcggaataccggcgctctgcggcttaatcggcttcagatctttatccagcatcacctcatcggaagagacgcccaccgcgctctccggcacctcgttcaccacaatacgcgcccaaggtacgtcaacgcggccatcgaggttaaacaggcttggcgtggcggtaaacaccacgtccggagaaacatccaggcggaccatcggcggcacggtaatgcgcacccggctgcccttcgccgcaatctgcgcgcgccagttgtcgagttgcgtccagtcggcgttgccgctcagcgcaatctgcccctgtttggtattcaccgtcccctgtagggtcgaacgcgttccgttaaagttcatcgccagttggctcggttgcatatcaaacggcataaagttgccgtcgatatcaacgccgctgagctgcatctgaccaaacagctgcgggctctgtaagttgccgcccagacgcagacgggcattaagcttgccttccgctttctcgccgcgagcgaagatcgggttaatcatcgccagcgagaagttgctgatgttgacgttgccgcccaggttacgccgcccctgcgggtcggtcacctccacctggccatcaagctggccgttgttggtcaggcgtatcagccagcccaactgcgcccggttgttatgcaggtcggcgctgaggttaagcgtatcgaaagccaccggcagcggcgcgtcgttgaccgtctgggtgactttgacgttgcgcccgctgagggtgactttgccctgcggcagcccctctttggtggtgtcccagctcacatcggcgttaccgctaaacacgccgcttgcctgggtcgcgtccggcataaacggcttcagcatcgccagatcaaaacggttgagattgaccaccgcgcgcccgctggcgccggcatcgatggtctgcggtacgcacagctcggcattcgggttgctccagcagtgcggcccgatgctgattttctgctcctgattacggtaatccagcgcaatgttgcgcgttagcgttaccggcccgaccggcgtctggaaacgggtattgctcagggtgcccttccagcgctcctctttacgatcgaagctgcccgccagcgtcagctggcccgacaccggatcgccctgtacgcgcagctgtaaatcatgctgcttctcggtacctttggcattcagctgcaccaggctgatgttaaccccaggctggctgatgcgatcgacgcgtacgtcaagattaccgccaatctggtcgctggatttgacgtcgcctttgacgttgacctgggctaccgtcagttcctgccagcgtaaagcgcgggcggtgatatccgccagcagctgcggcgcgtcgatggtgccgcgtaccttcagcagacctttcgccgtaccgccaagccccggcaacgcattgtcgagatgcggcgcatcgatggtggcgtcgagattgaggtctttcacccccagctcgcctttcacatcggcgctgtttgggccaagcgccagatgcagtcccggcactttccactgcatataactgttaccctgcagcgaaccgtgaacatccactttattctgtttcacgttgccggtaattttcagctcaggaaccgccatctgccaactgctgccatacaggctaccctgggttttgataatcccgttcagcttcgacggccagtccggcacctctttggcggtattaatgccatcgagggtcaattcgccgcgccagctgatcgcctgctgccagtcgagcaacgctttcagttcggttttcccctccagcgccgctacggtcagcttatccaggttcacctgctgttcattgcctttagcattaagggtaattttagccggcggcagcgactgccctttcaccgcggtactaaacgccatggtgtagtcggtcattttgccactgaatttcagatgcagatcatccgcctggaactgtttctcgccggtaaacggccagtacagctgcttacttttcacttccatattcagcggcagaccggcttccgccagctgcgcttcggcgcgcagggtcatggccaccgagccggctaaatcaacgccgacctgcagttttttacgcagctcgccgcctactttcagctttaccttctcgcctttcagcgggtcgatgttcagcgtgctgtcgagggtgatgtcgaccggccagttatcctgcagttgcgcggtgccggaagcggtaaccttgccctggtcggaatcgacgtccagcgcatcaagtttcatctgcccgtcgatactgctgaccttcagcagcaggttgtagacggtcatatcggtgtcgccggtcaggcgcagctgttcgccgcggaactcctgaatattaaggttcagcggcagatgcacatcgaccatttccggtagcaccggctgcgagaacagatctttcatcgtctcgccaagcggcttctcttccggtttcggatggtcaattttcggctccaccacctgctcctgcgccacttttgctaccttcggcagggcgatgagcaagccctggagcgaagtcggcgtcagggtcaggtttttctcctgccagttcaggccggtagagaaatcgcgcagcgaaacggcggtgtcgtcgattttgacattgacgttatgcagcgccacgcggctgagggtaatgggatatggcgtcgacaggttcagcgggccggaatcatcttcctctaccggcgccgaaggcggcatctttttggtatcgatagcgacgtagatatcccgcagcgagatatcgttaacgcagaggctgctatcccacaggcagcgcagcttgacgccgagatggaactggccggccgtcaccgccacgcccggctgttcgaagcgcacgttctgtaaggtcaggtcacgccagccgccggtgaccttgccgatctccagccccggcacccagcggtccgccgctttcagtaccagatgcaaaccggtagtggtgccgactaaaaagccgaccgcgccaatcagcaacactaaaaagagtaatacgccgaggcttatcttcttccataaactcataattcaggccccagaccgatataaaactgtaaaccgtgctcttctttgtcgccaataggtctggcgatatccagcttgatcggcccaaccggcgattgccagcgcacgccgacgcctgcgccggttttaaaatcgcttttacggatatcgctcaccgcttcgccgctatcgataaacgccgcgccccaccattttccggtgacgttgtattgatactccagcgagcctgtcgccagctttgacgcaccgatcagcttgccgtcgtcgtctttcggcgagatcgacttgtatttataaccacgaatgctgcggtcgccaccggcgaagaaacgcagatccggcgggactttgctgaagtcgtcggcttcaatccagccgaggttgccgcgcaccacgaaacgatggcggtcatagagggtgcggatccacacgtcctgcgcctgcatgacgataaagttaatatccgagccccacatggtgttggagtagtccaccgaatagcgctgggaatcgccccaggtcggcatcaggccgccgcgggagcgggtgcggtttaccgagacgccaggataaagcagcatggtggtattggtgacgttagcctgggtaaagtggtcaagactccagcgcaggttaatggcgcgctgccagccgctcgacatctcccaataacgcgacagcgccagggtggtggaatcggctttagtatcgttaaggtcggtgcgtttaaaaccaccctgcatcaggtaatactgctcaagcggactttttaacagcgggactttgtagctgaaatcgaactgttgctccggcgcggataggctgatgctggaggtcaggctgtggccataggagttcatccatggctttttccatgttgctttcacgcgcggcccaacgtctgtcgaataaccgaccccggtttccacggtgttctctttgcgtggcgaaacgacgccctgcagaggcagcaccttggttttacgtgatttatcaaactgcggggcgacgaccaccgagttaaaccagccggttgcggccagtcggcggttcagctccgccaaatcctgcgaggtgtaataatcaccctgtttaaatggcaccagattttgcaggtactcttcgcggatctgcgaaccggtaaagcttaccggtccaaagcggtagcgctcgccgctgttgtagtcaatgtcccaaaaagcctgatgacgatcgagcgacacgccgagctggcttttattgaactcgctatcgaaataacctttgcgcagcgccaccttggtgagcgagcttttgaagccgtcataatcgctgtgattgagcaccgtaccgattgccggacgcgttttcagcagatccaggtaatcacggtcggtgcgcgcgccgccgcgcaggatcacctcggtgccaccaatgcgcaccggctcgccgggagtcactttggcaatcagtacctggcgcccttttttaggcggcggacgcagatcgaaatcgatagtgggttcatagtaacccagcgctttcaggccctcacggatggcgtcatcgacgcgcgcgcgaaagcgacggtccggcgtgacctcatcgctctggatcgtggatagttgggcgcggacgtttttttccagttccccggataacccctcaacctgcaaacgcacattcgctgcgctggcgaccccgctgaccagcaaaaggctggtaacgcatatctggcggatttgttgcacgtgttctcctgaatatccttgtttcccccgaaggaaacgcaagtgccgctccacggcttaacaaaaccctaacaactaagggttgaaaaagtgacggtaacccaaataattcttatgtttaaatttagacgtattgagcgtgtttattgtctaaaaagatacgcgacgttacaaccttaaccacaaattgcgaggccaaccgtgagtctatttgataaaacgcatcttgtcgcccaggcggatgcgctgccggggcgcaacacgccgatgccggtagcaacgctccacgccgttaacggccactcaatgaccaacgttcctgaaggaatggaggtcgcgctgttcgcgatgggctgcttctgggcgtcgagcgtctgttctggcaattgccgggggtctacagcaccgcggcgggctataccggcggttacacgccaaacccgacctatcgtgaagtgtgcagcggcgacaccgggcacgcggaagcggtgcgcgtggtatatgacccgcaggtcatcagctatgagcaactgctgcaggttttctgggagaatcacgacccggcgcaagggatgcagcagggtaacgaccacggcacgcagtaccgttcggctatctacccgctgacgccggagcagcttgaagcggcgcaggccagcctggcgcgcttccagaaggcgatgcgcgacgccaacgatacccgcgagatcaccaccgagatcgccacggcaaaaccgttctactacgctgaggacgatcatcagcagtacctgcacaaaaacccgtacggctactgcggtatcggcgggattggcgtttgcctcccccgcaggcgtaatcctgtagaagaggccgctggtgcgaataattatcgctctggtggctttacagacatttacgctatactacgctgtgtcatagccggtccagcgccttcggaccggttttttatgtattccacattaaaagagttatccacttcccttccgaggatctggcctcaacggtcagaaaagatatgttaaacagtattttagtaatacttttccttattgccgtcagtgcgtttttttcgatctctgaaatctcactggccgcatcacgtaaaatcaaactcaaattgctggctgatgaaggcaatgtgaacgcgcagcgcgttctcaaaatgcaggaaaatcccggcaccttcttcaccgtcgtgcagatcggcctcaacgccgtggccattctgggtggtatcgtcggcgacgccgccttttcgcctgctttccacagcgtgctgagccgctacatgtcgccggagctgtccgagcagctgagctttattttctccttcacccttgtcaccagcttgttcatcctgtttgctgacctgacgccgaaacgcatcggtatgattgcgccagaagccgtggctttgcgcatcatcaacccgatgcgcttctgtttactggtcttccgcccgctggtgtggctgtttaacggtatggcaaataatattttccgcctgtttaaaatcccaatggtgcgtaaagacgacatcacctctgatgatatctacgcggtggtggaagccggcgcgctggccggggtactgcgtaaacaggaacacgaattaattgaaaacgtctttgagctggaatcccgtaccgtccctcttcgatgacgccgcgcgaaaacgtgatttggttcgatctgcacgaagacgagcagagcctgaagaataaagtggcggaacacccgcactccaagttcctggtatgtaacgaagatatcgatcacatcatcggctacgtcgattccaaagacctgctgaaccgcgtgctggcaaaccagagcctggtgttaaccggcggcgtgcaaatccgcaatacgctgatcgtgccggataccctgacgctctctgaagcgctggaaagctttaaaaccgccggcgaagacttcgcggtgatcatgaacgaatacgcgctggtggtggggattatcaccctcaacgacgtcatgactaccctgatgggcgacctggtcggccaggggctggaagaacaaatcgtcgcccgcgatgagaactcctggctgattgacggcgggacgccgatcgatgacgtgatgcgcgtgctggatattgatgaattcccgcagtccgataattacgagaccatcggcggctttatgatgttcatgctgcgtaagatcccgaaacgcaccgatgcggtgaagttctccggctacaagtttgaagtagtggatatcgataactaccgtatcgaccagctgctggtcacccgtatagacaacaaaccaacggtactggtaccgaaactgcctgatatcgaagaagcggcgaaaaaagagaaaggcgcggcgtaagcggccatgaaaacatcaacggctcccatcgggagccgttttttttcgtgccgtcataccacgttatgcggtttcagtttgcagacgcataacctgacgattgacttcggacatcactgagaaatgcagcttgtccttaaccttcgggataaggattttgcccttatcaaattcaaaagcgccaacgtccttgatgtacaaccgtccacgaaacaggatcttcacgtacttcgccacttgcagcggattgtagcgttggaaaattttcattgttgtctcctgccagggttacgctcctgcggtgccacagttagcccgcgtatcgggagcgcaaattttaatgccctaaaactatagtccagatttccgaagtcacccagtctgtagaagttttttaccctttgatgacaataattcagaattttcgtttcaggcatacgtagttgttagtataagtttccgtttttgattgaatgtgtgcgttagcacgcaaactggcatcacgattgcgggtaatggcgacaattcgcacttatcattaaataagaccaagtggtcggatcacctgcatataaaaaaaggatatctcatgaccctacgtaagttgctggcggtttccgccctcctgttgccgttaatggcttcggcgcataattttgtcgacggtcaacgcgtcgcgccggtaggcatcgccgaccgcggagaactgatactgaataacgataagtttagctacaaaaactggaatagctcgcagctggcgggaaaagtgcgcgtcatccagcatattgccgggcgcacctcggcaaaagagaaaaatgccaatctgattgaggcgattaaggcggctggcctgccgcacgaccgctaccagaccactaccatcgtcaataccgacgacgcaatccctggttcaggaatgtttgtgcgcagcagcattgagagcaataagcagctctatccgtggtcgcagtttatcgtcgacagcaacggcctcgcgcgcaaagcctggcagctcgatgaaggcagttcggcaattgtggtgttagataaagacgggcgtgttcagtgggcaaaagacggcgcgctgacccagcaagaggtgcagcaggttgtcggcctgctgcataagctgcttaataaatagagacgcggaagccggggttgaggaaggattcacgcggcgtgtagtcaagggttttaccctgccagtcgtgaacgtgcgccccggcggctaccgcgaccgcatgaccggcggcagtgtcccaggtgctggtcggcccgaagcgcggatagagctgcgcctggccttctgccaccaggcagaatttcaacgacgagccgattgaggtggtctggtgctcgcccagttgctccagatactcctgcagctccgggtcattaccgtgggagcggctaatcaccaccagcggcgggcgagcatcgcgaacctgaatctgcttgcgcacaccgcactcttctttccacgccttgccgttttgcgcgctgtacatcactttcatcaccggcgcgtacaccacacccagtgtcggtttgccgttttcaatcagcgcgatattgacggtgaattcgccgttgcgcttgataaattcttttgtgccgtccagcgggtcgaccagccagtagcgctgccagtgctggcgtacttcccactctggtggatcctcttcagagaggatcggtatcgtgtcgtccagcgcctgtaagccgctgacaatgactttatgcgcggcgatatccgccgcggtaaccggagaatcatcctttttgctgctcacatccatcggctggttcccatcgtagacatccatgatggcatcgcccgcagtccgtgcaagctgacatacttgttctaacattctccacctcttctggttacagtggcgttaactcgttgttttatttatatcgcatcatcaccagttccgctatctgtgataacactagcggtttccattcacgcttttctggcagaattcacaattctgtaagcaacagaatgtaaatacattttcttttgtgccattgctcataaaaaaggacgcctctgatgattaagtttagcgcaacgctgctggccacgctggtggcggccagcgtcaacgcggcgacggtcgacctgcggatcatggaaaccaccgatctgcacagcaatatgatggatttcgattactacaaagatgccgcgacggaaaaattcggcctggtcagaaccgccagtctgattgaaaaagcccgcgcggaagcgaaaaacagcgtgctggtggataacggcgatgttattcagggtagcccactgggcgactatatggcggcaaaaggactcaaagagggggatgtgcatccggtttataaggcgatgaacaccctgaattacgccgtcggcaacctgggcaaccatgaattcaactacggtctcgacttcctgcacaaggcgctggccggggcgaaattcccctacgttaacgccaacattatcgatctcaaaaccggcaaaccgatgttcacgccctatctgattcaggatacccaggttcaggatagctatggtcaaccccataccctgcgcatcggctatatcggttttgtgccgccgcagatcatgacctgggataaagccaatctcagcggcaaggtgaaggtcaacgacattaccgaaaccgcacgcaagtacgtgccggagatgcgcgcgaaaggcgctgatgtggtggtcgtggttgcgcattccggcctctccgcagacccctatcaggcaatggcggaaaactcggtctactacttaagccaggtacccggcgttgatgccattatgttcggccacgcccacgcggtgttccccggtaaagacttcgccaccattaaaggcgcagatatcgccaaaggtacgctgaatggtattccggcggtgatgccgggaatgtggggcgatcatctcggggtggtcgatttggtgctgaataacgacagcggtaaatggcaagtgacgcaggccaaagccgaagcgcgacctatttacgacgcggtagcgaaaaagtcgctggcggcggaagatagtaaaatggtggcggtgctgaaagccgatcacgacgccacacgcgaattcgtcagcaagcctatcggcaagtccgccgacaacatgtacagctacctggcgctggtgcaggacgacccgacggtgcaggtagtcaacatggcgcaaaaggcctacgtcgaacactacatccagggcgatccggatctggcgaaactgccggtactctccgccgccgcgccgtttaaagtcggcgggcgtaaaaacgatccggcaagcttcgtcgaagtggaaaaaggccagctcaccttccgtaacgccgccgatctctatctctacccgaatacgctggtagtgatgaaagtaagcggtaaagaggtcaaggagtggctcgaatgctccgccgggcagtttaaccagattgaccccgccagcagcaaaccgcagtcgttgattaactgggacgggttccgcacctataacttcgacgtgattgacggcgtaaattaccagatcgacgtcagccaaccggcgcgctacgatggcgagtgccagatgattcacccgcagtcagaacgcatcaaagacctgacctttaacggtaagcctatcgatccgcaagccaccttcctggtcgccaccaacaactatcgcgcctacggcggcaaattcgccgggaccggcgacagccatatcgcttttgcctccccggacgaaaaccgttcggtgctggcggcgtggattggcgcgcagtcgaagaaagatggcgcgatccatccggcggcagataacaactggcggctggcgccgattcacagcaagacgccgttagatattcgctttgagacctcgcctggcgacaaagccgcggcgtttatcaaagagaaagcacagtatccgatgcggcaggtggcgaccgatgatatcggcttcgctatttatcagctggatttgagtcagtaatgcctgttccccggtggcgctgcgcttaccggggctacagagtggagccggctggtagcccgaataaggcgccagccgctatccggggttacagggagtgatacattttcactccccgtggttagccagcaccgcggggagattcagctcgatccagtccgccagcgccgccaccttctcgctcacctgcaggccgagcggcgtcaggctatattcaacatgcggcggcaccaccggatacgaaacgcggtcgataaagccatcctgttccagagcctgtaaggactgcgccagcattttttcgctgacgccgcccattttgcgccgcagatcgctaaaacggtgggtcccctcgcgtagcgccaccagaatcagcacgccccagcggctggtcacgtgttttagcacatcacgcgacgggcactgttcagcaaacagattcccgttgcgcagtttgtcgctcagcgtcggttcggccattttatacttacctttttgtacgtacttactaaaagttagttaaggtgttagcttaccacaactgccaatgaacacgaaggagaagacctatgatcgcgattaccggcgccaccggccaacttggccagcacgtactgcatgatttgttacaaaccgtccccgccagccagattgtggcgattgtccgcaacccggcgaaagcgcaagcgctcagccagcagggtgtgattgtgcgccaggccgagtacggcgatgaggccgcccttaccgccgcgttgcaaggggttgataaactgctattaatctcctcaagcgaagtcggccagcgcgccgtccagcaccgtaacgtcattaacgccgccaaagccgctggggtgaaatttatcgcctataccagcctgctgcatgccgatacctcaccgctgggcctggccggtgaacatatcgaaaccgaacaaatgctggctgattccggtattccttacgcgctgctgcgcaacggctggtataccgaaaactatctggccagcgcgccgccggcgctggaacacggcgtgtttattggcgccgccggggagggtaaaatcgcctccgccacccgtgccgattatgccgccgccgccgcccgcgttatagccagtgagggccatgcaggaaaagtttacgaactggcgggagataacgcctggaccctgagcgaactggctgcagagctgagcaagcaaagcgggaaaaaagtggtttatcaaaacctcagcgaagccgatttcgccgccgcgctgaaaaacgtcggcctgccgtccgggcttgccgatatgttggcggattccgataccggcgcgtcgaaaggcggactgtttgatgacagccgcactctgagcaaactgattggccgcccgactacgtcgcttgccgatagcgtgaaaggcatcatctaaccgctccctgtcagtttttgcggttgcgtcccggcgcttcatctctaatattgaagggatgaatcgtcgggagacacggcatgcagggcgtaccaccacaatttagcgacgaaaaagaccacgcgcgctttcgccatctcgaacaacttcccggcgttgagctctatcacgcccatatttctcgttatgcctttgaaccgcatacccatgaagccttcggcatcggcgtgattgaacaaggcgccgaacgctttcgttatcgcggtagtcagcacgtcgcctcagccaattccatcgtcaccatgaatccggatgagctccataccggcgaggcggaaaccgccgaaggctggcgctaccggatgatttatctggagccggatcggctggaagcctttaccggcgttcgccactggtggttcagcgaggttgtacgccaggagccgcagcgcgcccggcaaatcggccaactgatttacggcctgtggcacgctgacgatccgctggtgcagcaggggatactgctcgacctggttgataccttccgcccgctggctcaccatgcgccaatggcgccggaagcggcgcaccgtttcgatcgggtacgcgactacctgcacgataactatatgcgcgccgtcagccttgatgaactggcgcaggtggcagcgctcagcccctatcacttccagcgccagtttaaagcccactttcacgttaccccacaccagatgctgatggcgattcgcctgtggcgcgccaaggcgtttctgacccacggcatgcctgccgccgaagtggctatcgccgccggattaaccgaccagtcacatttaacccgcgcctttacccgtcgctacggcatcacaccggtgcgttatcaaaaacaggtcgccgggcgctaaagcgcaatctcatacaatattctttccctcgcgccctcctacacttggcgcaagtaaactgaagatggatgtcatcatgattagcggcgtgttgtatgccctgctggcggggttaatgtgggggctgattttcgtcggcccgttgctggtgccggaatatccggcggtgctgcagtcgatggggcgctatctggcgctgggacttatcgccctgccgctggcgtggctcggccgcgcgcgtctgcggcaactgaacggtaaagattggtggaccgcgctggcgctgaccatgatggggaacctgatctattacttctgtcttgccagcgccattcagcgcaccggcgcgccggtatcgacaatgattatcggcaccctgccggtagtactgccggtgtgcgccaacctgctgtatagccagcgcgatggcaagctgccgtggcggcggctatttccggcgctaatctgtattgccctggggctggtgtgcgtcaacgtggcggagttgcagcacggacttcctgatttcagcccgtggcgctatggttcgggcattcttctcgcgctgatcgccgtcgtctgctgggcgtggtatgccctgcgcaacgcccgctggttgcgtgaaaacccggataagccgccgatgatgtgggccaccgcgcaggcgttggtcaccctgccggtctcgctggtcggttatattgtcgcctgcgggtggctgcagggccagcatagcgacttcccgctccccttcggcccgcgcccggcggttttcatcgtcctgatgctggcgatcgccgtgctctgctcgtgggtgggcgcactgtgctggaacattgccagccagcgcctgccgacggtgatcctcggaccgctgatcgtcttcgagacgctggccggtctgctgtacaccttcctgctacgccagagtctgcctccgctgctgacgctgagcgggatcctgctgctggtgctcggcgtggtgtcgtcggttcgcgcccgcccggaaaaaccggttctacaggaactgcgcgtggagccaaaaaaatagcctggtatcctaaaggggtattcccatggattaaagatgcatttaatatgcatcttatattcttgatgacgaggtaattgctatggctttccgtgaccaacctttaggcgagctggcgctgagcatcccgcgcgcctccgcgctgttccgtaaatacgatatggattactgctgcggcggcaaacaaaccctggatcgcgcggcggcgcgcaaagcgctggacgtcgcggcaattgaagccgagctgacaaaactggccgagcagccgatcgagcgcgactggcgcgccgcgccgttcaccgacatcatcgaccacattatcgtccgctatcatgatcgtcaccgcgaacagctgccggaactgattctgcaggcaaccaaggttgaacgcgtccacgccgataagccgaacgtgccaaaaggactaaccaaatatctgaccatgctgcaccaggagctctccagccacatgatgaaagaggagcagatcctgttcccgatgatcaagcaggggatgggaactcaggccggtggtcctatcagcgtgatggaaagcgagcacgacgaagcgggcgaactgttggaagtcatcaagcacatcacccataacgtgacgccgccgccggaagcctgcaccacctggaaagcgatgtacaacggcattaacgagatgattgacgacctgatggagcacatcagtctggaaaacaacgtgctgttcccgcgtgccctcgcaggaaaaccataaaaaaaggcgcccgcaggcgccctctcgacattgtcagtttattggccactccgggtggccttttttatttcgccagacgttttttaccggcaaacagccagcccgcgcccagcagaacaaaccacagcggggtaaccatcagcgcttcgcgggtatcatcttccagcgtcaacagcaccagtacgaagacgaagaaggccatgcacacccagcacatcactttacccagcggcatcttatagatggacttctcgtgcagctgcggacgctttttacgatagaccaggtaagagcagaggataatggtccagacgaacatgaacagaatcgccgacaccgtggtgatcatggtgaacgcggcaatcacgctcgggttgaccatcagcatcaccacgccgcccagcaggcacatgcaggagaaggttaagcccttcgccggcaccgcgcgcttcgacagcttggcgaacattttcggcgcctggccttcctgcgccagaccgaacagcatacggctggtggagaacactccgctgttagcggaagaggcggcggaagtcagtaccacgaagttgatcaggctggcggcagccggcaggccaaccagaacaaacagctcaacgaacgggctcttgctcggcacgacggagctccacggcgtcaccgacataatcacaatcagcgcgaagacgtagaacataatgatacgcagcgggatggagttgatcgcccgcggcagcgatttttccgggtctttggtttccgccgcggtggtacccaccagctcaatccccacgaaggcgaataccgctatctggaagccggcaaagaagccactgaggcctttcgggaaccagccgccgtcattccacagatgcgcgaatgaggcttcgacgccggtcggcgatttaaagtgcatcatcaccatcaccaggccgaccacgatcagcgccacgatggcgacgattttgatcatcgcgaaccagaactccatttcgccaaacatcttcacggtagcgaggttcaggcccagcagcagcaggataaccgctaacgaagcgacccagtcagaaagtccggggaaccagaactgcgcgtaggcggtgatggcgacaacgtccgccatcccggtgaccacccaacagaaccagtaggtccagccggtaaaataccccgcccacggccctaacaggtcggaggcgaagtcactgaatgatttatattcgaggttcgacagcagtaattcgcccatggcacgcatgacgaaaaacagcataaaaccgatgatcatataaacaaaaataatggatggcccggcgagactgatggtcttgccagaccccataaacagcccggtgccgatcgccccgccgatagcaataagctgaatatgccggttagtgagatttcgccgtagcgattgttcagtcgtctcctgctcgtcggcaacgactttgacctgatctaccatgtgattttcttcctgttgtacctgtctgtgttgttcaggctctgttggcctgtcatttgtcgcaaccctggcaagagggtttatcgatattaggtaagaatcggagggatgaatactatgatttagatataatgttaattttatgtttaaagtgagtgttatatcaccaatgtaacgcgaaacagctcacaaaaatacactcaacgaacttatatgcaatacaaaattccaataaatttataacttaaggattttacactatttttatcggctccctcccctgacaggagaggaagcccctggtgcttaaataatgtccagcagctcaacttcgaagataagggtgctgaatggcgggatagaagcacccgcgccgcgctcgccgtaagccaggttgtgcggaatggtcagctcccatttggaacctaccggcatcagggtcagcgcttcgatccagccgccgatcacgccggtcaccgggaattcagccggttcgccgcgggccacggagctatcgaacacggtaccgtcgataagtttgccggtgtagtgaacgcgtacgcggtcggtgcgcgccgggatcgggccttcgccctgcgtcaggacgcggaactgcaggccggattcagtgctgttcacgccttctttttcacggttttcatcgaggtatttctggccatcagcggccatcgcctggaagcgctcgcgacgcacggcgtcagcgcgttcatggatttcacgcagcgcacggtgtacggcttcaaccggcacctgcggctgattaccttccagcgcatcggcaatgccggcaaccagcgcttccggcagcagccctgcaggccggattcgctcagttgttgtccaacctgcaagccgataccgtaacttgcctgcgcttcgatagtgtcaaaagtcggggttgccatctttgttccttttttgggtgataaacatcttgagaaaagcgttcgaaagcataacagccatagaggaatgggtaaaactttgtcggcggatgatgacaaatctcagcgaaacagaaacaataggcgatatcaggttaacctctaccttcaggacgttagccgtctatactcatgagcaggataaaaatatgcggagcaggaggaaagccatgcccgggcgctttgaactgacatctaccctggcgaagatctggcacgccccggatcaacttcgtctcatggatccgctaccgcccatgcaccgccgcggcatcatcgccggcttcctgctggtcattattggtttcctgctcccctccggcgataacagcacgccgacccaggccagccgcgaagccagtctcgatctgcagtcccagtctcagccgcaaggttcaggcaatcaggccgtaccgcttccgccaatcaccaatacgccgacggtcagcgatgccgatcaggttgcgcctgtggcgcctgaagccattcaggatgaacagccggaccagccgcagacgcaaacctcttcctcttctcagccgtaccagcagcccgcgcagcagcagtctgctccgggcattgaacagcagtggcgcacctaccggattgaatccggcaaaacgctggcgcagctattccgcgaccacggtctgccagccactgacgtctacgccatggcgcaggtcgaaggcgccggcaaaccattaagcaccttgcaaagtggacaaacggtgcaaattcgccagaacgccaacggcgtagtcaccggcctcactattgataccggcaacggccaacaggtactgttcacccgccagtcgaatggcagcttcgtgcgcgcgcgctaaacgcttcgcttaggtcgggttgcgcgcccggcctaacgcgcctggcttttgttcacccagcggatccctacacacaccagcaccagcgcaatcgcgtacttccactcgaaaatattctcgccaagaaagatcgccgacagcaccgtcccggccaccgggataacaaagttaaacggcgcaatcatactgacgcggttgtgcttgagcagcacgctccatagtgcaaaagctatcgacgacagcagagttaaatagccaaggatcatcgctgcggtcaggctgtgcatccgtagctccccgccggtcaaatacccgcccgccaccagcaccagaccgccgaaggccagttgccagccggtcatcaccgttgggtcgacggtttgcgagatgcgtttgccgtagagcgtcgccgccgagaggatgaacgccgccagcacgacaaatccatcaccctgccagacaaaattaaaatcgcccaatgaggtgttgaggttcaccaacatcacgccgacgaagccaagcacgcagccgatagttttgttgtagctgagccggtcattctggtagataaaatgcgccagcagaacgctgaagaacgttccggtggcattcatgatcgatcccttcactccggtggtgaatgccaggccgacgtagaagaaggcgtactggatagcggtctgcgtcagccccagcaccgccagttgcccgcactggcggccattgagccgggcgatgggtttgcgctgcgccagcgcaaacagcagcaacaataagcccgcaaacaggaagcgatatccggcaaaaacaatttttgagggaacatcatcggtggcgatgtgcaaaagctcatagccgtttttaatcgccggataagaactgccccacagcagacagcatagggtcgcgcagacataagctacttttttattggcaaaaatcgaggggtcgtaaaggaagcgtccattaactttaccggaaataaaatcgtgttttattttattatccagaaagtggcgagaatagctaccataccagataaaaatcaggctggcgctaaaaagcaaaacgccggcacaaggccggcgcatcgacgtgagttgagtaaaaattactcagctacaacgttaacaaccagtttagcgaagacttcgctgtgaacctggaagtctacttcgtgctcaccggtggtgcgcagaacgccgttcggcaggcgaacttcgctcttcgcaacggcaacgccagctgcagaaacagcgtcagcgatgtcgcgagtaccgatggaaccgaacagtttaccttcgtcgccagatttggacgcgatggtaacggtgcccagtgcgttgattgcttcagcacgtgcgttagcagcggccagaacgtcagccagtttggcttccagttcagcgcggcgcgcttcgaagaactcaacgtttttcttggtagctggaacagctttaccctgtggtaccaggaagttacgagcatagcccgctttaacgtttacctgatcacccaggctacccaggtttgctactttatcaagcagaataacttgcattaccttatcctctcaaagtcgtattaatggaccgtgaccgattactgatgacgatcagtgtacggcagcagggacaggtagcgtgcgcgtttgatagcgcgagccagctgacgctgatattttgcacgggtaccggtgatacggcttgggacaatcttaccgctttcggtgatgtagtttttcagcgtagcgatatctttatagtcgatctcttgaacgccttccgcggtgaaacggcagaacttgcgacgacggaaataacgtgccatatggctagtctccagaatctatcaattcaatctgctcggcatgcagaaccattttactcaagccgttctttgccttatggcaactaatgaacccttgaacggtgactgcgctaccgaccgttatactgtgagtaatggcctggttctcgtgtccgctaataataacgggcatttggcaccacgcctgccggtgaaaaccggcttcctcctgcacagaacgatgctcaagcacgaactggcaatgaggaattcctgacgggctgacctttcgaaggggcatcctgcacacggtgccggacaacaccagacggttggtcatcaggattactcttcagaatccccagcttcagaatcatctgcggtttcgttagcgaaatcttcacgacgctcacggcgctcgtctttcgctttaaccatcggagatgcttcggtaacagcgtgcttagtacgcattaccatgctgcggataacggcgtcgttgaagcggaagttagtttccagctcatcgatcgcttcctgcggcgcttcaacgttcagcagaacgtagtgagctttgtgcagtttgttgatcggataagccagctgacggcggccccagtcttccagacggtggatcgtaccttctgctgcagtgattgcaccagtgtaacgttcgatcatgcccggaacctgttcgctctggtcaggatggaccataaaaacgatttcgtaatgacgcatcgaattgctccttacggattattcagcctcctgtctgggtcagccgcggcccatggaggcaaggaacgtgttaaagggcggctgaaaaattgacgcgtcattctaattgcgccccccaggaacacaagcgcatttgcacaaataattcgcactaagcgccaagctgagctaagtgggtgatttaaaattaaccaataacgaacgcggcatttttttgaacaactgcatcagaaaaggtcgctatcaggcggcacgccagcgattacaatttaatcaatggccagacaccagcaagaggagtccagcgttttacccgtactgtcagtaaggagcgttctatgaaaagcattatcatcgccgttatggctgcgctactccttagcgccaacgcgctggcagccatcaaaatcgatgggcgtcaggctcgcaacatggacgatgtgcagagtctgggcgtaatttatatcaatcataatatggctagcgaacaagaggccgaccaggcctgaaccaggaaagcgatgccctgggagcgaagtacttccagccaatcctgattcacgaaccgcagagcaatggccttattcatgccagcgccgctatttaccgctaacccaggtcgatgcttcgcctctcctcacgaggggcgaagcgatagccgatgtaaacgcaattgagaattattttccaaactgacttaccagcgtcatcgcaacctgctttaatcgtcaattcaccgtttgttaatcaggagtgattgatggtcccgcgtttcgcgacgttaggccgcatcccgaaaggagtttgggtgctcggcggcgtcagcctgttaatggatgtctcgtcagagatgatccacagcctgctaccgttgtttatggccactacgctcggcgccagcgtcattattatcggtcttatcgaagggctggccgaagccaccgccttaattctcaaagtcttctccggcgtcattagcgactacgttggcaaacgcaaagggctggcgctgcttggctacgggctgggggcgctgagtaaaccgctgtttgccatcgcgccgagcgccggggtggtatttagcgcccgcatgatcgaccgcgtcggaaaaggtatccgcggagcgccgcgcgatgcgctggtcgccgacgtaacaccgccggagatccgtggcgctgcttacgggttacgccaggcgctggataccgtcggcgcctttctcggcccgctgctggcggtgctgctgatgttcatctgggccaacgattttcacgctatcttctgggtgtcggtcattcccgccgtactatccattgctctactgggttttggcctgcaggagccgaaatcctccatcgcgcacaaacgtagcaatccgctgaagcgcgaaaacctgaaaaagctctctgccgcctactggtgggtggtggcgatcggcagtatcttcaccctcgcccgcttcagcgaagcttttttggtgctgcgcgcccagcagatggagatcccgctatttactattccgctggtcatggtcgcgatgaacctggtctacagcctcacggcttaccctttcggtaagctctctgacagcatgagccacagtaaactgctgcaatgggggctactgatgctgatcctcgccgatatcgtgctggcgctcagcggccactggagcacgctgctgatcggcgtcgcgctgtgggggattcacatggggatgactcaaggcctactggcggctatggttgcgcataccgcgccgccggaactacgcggtaccgcattcggcatgtttaacctgatgagcgggctggcgctgctgctggccagtaccggcgcggggatactctgggaaaccttcggcgccgcatcgacgttttacgccggcgcggtgatttgcgtggtcacgctcatcggcatgcgctgtatgccatcggcctatcgccaggggtaaaaacggctccggggccagaccagttgcttcacccggaggtgaaagccccggagcgcgtagcttacttctgcccgtagtaggcgtcaggcccgtgtttacgcagaaaatgtttttccattagccagttgtcgattggctgtagctgcggattgatcccgcgggcgatccacgccattcgcgccacttcttccatcaccaccgcattgtgcaccgcctcgtgggcatctttcccccaggagaagggaccgtgctggtagacaacgattcctggcgtatgtaacgggttagcctcgcccagcgtttcgataatcaccttcccggtgttcagctcataggcctctttcacttcctgtgcgctaagcgcccgggtgcaggggatatcgccgaagaagtaatccgcgtgggtggtgccgagcgccgggattgccagccccgcctgcgcccaggcggtagcgtgcgtcgagtgggtatgcaccacccgccgaggccggaataacggcggtataacgcaaggtgggtagcggtatcagaagagggacgccagcgcccttccaccacgttgccctgcaaatcgaccaccaccatatcatcgacggtcattgactcgtaggctacgccgctgggcttaatcaccaccagcccacgctgccggtcgattgcgctgacgttgccccaggtaaaggtcaccagcccgtagcgcggcagatccatattagctgcaaatacctgctgtttaagctgctgcattatgccgcctccgtcaggcccgcgcgggccatccgcgctttcacccagtcgcgagcctttgcgacttccgccgccgggtcatcggtggtttcgctccacatctcaatcagatacggaccgcagtagcctgtctgcttgagcgtttcgaagcaacgttcaaaatcgacgaccccttcaccaaacggcacgtttttaaagacgccgggcttagtatctttgacatgtaccgccacgatatgcccatgccggcctgcaattccatctgtacgtcgttatcccacgccgacagattgccaatatccggataaagctggaaccacggattgttcaggtagtgagcatagcccagcgccttactgattgagttcatcagcggatagtccatgatttccatcgccagcgtgacctgagctcggctggccatctcgacgctctctttcaagccttcgcgaaaacggcggcgagtttcatcattcgcctgctggtaataaacatcgtagcccgccagctggatcacccgaatccccacatcctgcgccagctggatggctttacgcatgatgtccagcccctgattacgcaccacgtcatcttcgctgccgagcggaaaacgacgatgggcgctgaggcacatcgatggcacccggacgccggtttcggctaccgccttgaccagcgccaggcgctgctcctggctccagtcaagccgggcgagacgggcatcggtttcatcaagcgacatttcgacaaaatcaaaacccagcgcttttgcaatcgtaagccgctccagccagcactccccggcggggagcgctttttcatagataccgagcggaatttgtttcgacaacatagccgctccttaaccccacaactgggcgatagagcgtttaaactgacgcgccgcttccaccggcgaggcggcatcgcggatgctgcgcccggcgataaagacgtgaataggaataccggcgaacagcggcaggtcttccagcgccagcccgccggtcacggtgactttgaagcccatatcggaaagacgcttaatcgcgctgatatccgcctcgctccaggccacgcccgccgcctgcgcgtcgcggctgcggtgatagaccacctgctgaatgcccgcatcacgccacgcctgcgcctgctcccaggtccagaagccggtcagttcaatttgtacgtcgccgttgaactctttggcgacatccagcgcccctttggcggtgttgatatcggcgcagcagatcacggtcacccagtcagcgttggcttcaaagcacatccgcgacaggatttttccggcatcggcgattttggcatccgccagcacgattttatgcgggtacagcgctttcagatcgcggaccgcacgcaccccttcgccaacgcagagaatagtaccgacttcaatgatatccacctcttcggcgatcagtcgggtggtctcataagcgtgagacagggtttggttatccagcgcaacctgcaacattggtaactgagacatcgtatcaactccctcttaaacagccgccgcagtggcgttttcaattaaatccagcacttcctgctcggtgcggcaggcgcgtaaacggtcgaaattggcttcgtcatcaaacaggttaacgatctgcatgatgcccacctcctggtgggtggtggcgtctactgccgccatggtgatcagaatgtcgaccgggtcgttatcttcgtgattgaaaatcagcggttttttgagggttaccagcgcaaagccggttttcttaacgccctcttccggacgcccatgaggcatcgccagccccggcgcgataacaaaatagggaccatgctgcgcgacgccatcgaggatcgcctggtagtaacgcggttccactacgtcggcggccaccagcaaatcaacgccgattttcaccgcctcctgccagttttccgcctccgcctgcaggcgtatggagtggttctgcgccagagaatcatgaagtttcatggcgactccttatttcacatcctgcgggaagtgggctttgatcacttcgagcagttttgggccgaaatccgcaggcgacagcatattgcgcacgccaaccacgtatttattaccagtgacggtgatttcgccggcgatgtgggtcgaggcgatgatgatgtccgcaccgtttagttcgcttttatattcacctaccgcgcagctgttcaccgtgtggtcgatattggattgcgtcaggaactggtccaccttcattttcatgatcatggaactaccttgcccgttgccacacacagccagaatacgtacggtcataatcagaactccttattgagcagaggcttctgccagttgtttttccgcatcttcctcggcgcgcagcgcgcgaccggcgaagaacatataagccagtgaaatcagaataatgacggccataaacgccagccctatcgaggcgaagccctgcatcatcggcggcgccaggattgaccaatccgccatccccatccaggcgctcatcccggtcagcttcaccgcccacacgcagccgaagatttctatcatgcccatcaccagacagatcttgagcgccgcgcgccagccgccgaagtggttagcaaagacgccaatcgtcgcgttagagaagaacattgggataaagcccgggatgatcagaatggaggagccaatgccgacgagaataccaacggcaatcagttggccgatggtgcccacataaagccccagaccacggcattcggcgcgaagctatagatagcggcgcagtcaatcgccagcacagcgccggggatcaggcgctgagagatgccgttaaaggcttcggacagctcggcgacgaacatacgtacgccctgggtaatgatgaaaatggccacggcgaaggagaaaccggtctgcaggatatagaccgtccagtgggttttgcccgccatcgcctgtacaacgtcgatgccaaaagagagcagaatggcgccaaagaaaatggtcatcacaatcgcggtagagacaatgttatcgtggaagatattgagccaaccgggcagcttgaggtcttcgacgctctcctcttttttccccagatacggcgccactttataggcaatccacgaagcaaactgctgttggtggccgatagagaagccgcagccgtcggtaaccagctgagtcggcttgaacatcatgttggaggtgataccccagtacagggagaccagtaccgcagtgcagataatggtcgtccacatggagtagccgaagatgaagaaagagaccgcaatcagccccgcctgctgaaacatgatatggccagtcagcatgatggtgcggatgccggtaatgcggcgcagcaggacgtaacagatgtttagcgccagcgccagcagcaccgcatatcccacccagctataggcttcacccatccggtcgatggtcgccatcatcgaggcgtaggtgtcggaaatcgcgccattgatgccataaacctctgacattttcgccactaccggcttaaaggtgctggtaagaatgccggagccggcttgtaacagcatgaaaccaatgatggttttgatcgtgcctttgataatcacgctgacgcttttacgcaacaagatatagccaaggcaggtcacgatacccagcagcagcggggcattagtcattacctgattaaagaagacggtaaagatgttgtagaggatctccataacacactccagaagaggaaggctttgaacgcgcatgacgctcagcagttgtcgtcgccctcactctaataatcaaaaacaatcacaacaagattgaatttgattaattgtgacgcatcacgcaaataatcacattttttatgcgcctatttgcaaccacgtcacaacgccaccaaacaaaccactaatatcaataatatacatacatcaacgatactaaattcagggtttatcagcgcgttagcgcgacggtatcaccgcttttagttgaaaatagctgattgcattcctgaaaaaacagtgccaatatcaatcaaaataaatcaccacttgattacttttgaaataaaagaggaagagaccgatgagtaaagtgcaaaccatcacccgtgaatcctggattttgagcactttcccggaatggggtagctggctgaatgaagagatagaacaagagcaggttgcgccaggcacctttgccatgtggtggctgggatgcaccggtatttggctaaaatcggaaggcggcgctaatatttgcgtcgatttctggtgcggcaccggtaagcagagccacggaaatccgctgatgaaaaccggccaccagatgcagcgcatggccggcgtgaaaaaactgcagccgaacctgcgcactacgccattcgtgctcgatcctttcgccatccgtcaaattgacgccgtgctggcgacacacgaccacaacgatcatatcgacgttaacgtcgccgccgcggtgatgcaaaactgcgccgccgatgtgccgtttatcgggccgaaaacctgcgttgacctgtggattggctggggcgtgccgaaagaacgctgcatcgtcatgaagccgggtgatgtggtgaagatcaaagacgttgagatccacgcgctcgacgcattcgatcgtacggccctcattacccttcccgccgatcaaaaagctgccggcgtgctgcctgacggcatggaccaacgcgcggtcaactatctgttcaaaacgccgggcggaaacttgtaccatagcggcgactcccactactccaattattacgcgaagcacggcaacgaccatcagattgacgtcgccctcggttcctacggggaaaacccacgcggcatcaccgacaaaatgaccagcgccgatatcctgcgcatggcggaatcgctgaataccaaagtggttatcccgttccatcacgatatctggtccaacttccaggccgacccgcaagagatccgcgtactgtgggaaatgaaaaaagatcgtctgaaatacggcttcaagccgtttatctggcaggtcggcggtaaatttacctggccgctggataaagacaatttcgagtaccactacccacgcggattcgacgactgctttaccattgagccggacctgccgttcaaatccttcttgtaaccgtatcccggcgggcgcgcccgccggaattccctttccgcattagtatttagcgttgatttcaaatattatctttgcttgtcacttttaatcggattcgctcatgactgaagcgcaaagacaccaaattttactggatttgctggcgcaaacgggattcgtcaccgttgaacaggtaatttcccgcctcggcatctctccggcgacggcaagacgcgatattaataagctggatgaaaacggtaagctgaagaaagtccgtaatggcgcggaagccatcagcgaacagcgcccgcgttggtcgccaatgaacattcatcaggcgcaaaaccatgatgagaaagtgcggattgcccgcgccgcctcgcagctggtgtcgccgggcgaaagcattgttatcaactgcggctccactgccttcctgctcggccgcgaactatgcggcaaaccggtgcagatcatcaccaactacctgccgctggccaactatctgattgatcaggagcatgacagcgtcatcattatgggggggcaatataaccacagccacttcatcaccctcagtccacaaggtagcgaaaatagtctgtatgccggccactggatgttcaccagcggcaaagggttaaccgccgagggattgtacaaaaccgatatgttgaccgcgatggccgaacagaaaatgctgaacgtcgtcggcaagctggcggtactggtcgatagcagcaaagtcggcgaacgcgccggaatgcttttcagccaggccagccaaatcgacctggtcattaccggtaagcaggccgatgaaacgatcctcaagcagcttgaggatcagggcgtgcaggttattcgcgtttaaagatgccgcagaaaaaaggcggtggtcgcgtccaacgcttccggggtaatgcgatgacgcacgcccttttgccagtgacaggtcaggttagctgccaggccgctctgcgttaacgcctgctgtaggcggaaagtgtcgccgggcggaaccacatcatcggcatcgccgtgccacagcagcaacggcttatcagccactgccgccagctgatgagtgacgtcccactccgccaggcttgccgtatcgaattcgggcgacggaaacaacgtctgtgcaagggtgctgaaatagcccgagcccatcaggcaggccacgcatttaagctcaggatgatgggtcatgatgccgagcgcgctcatgccgcccattgacgcgccggccaccgccagccgcccgtccttcagccaaccttcagcgataatcgcttctcgcagtgcgggaaactcaagaaaattttgtcgcaggatcggccaaaagcgctgcattcgcccggcatcatcgccgtaaaaacgtgcgccatgttcggcggcatccggcataatcacccggaagccggcttcggccagcgcgacggcgaagtagctgtagaccagcttggaagaggtaaaaccgtgatagaagacgataaccggcagcggtttctccgccatcccagccggaaaggcgtgaatcacttcaccgccaaccagattgcgcatttccagtgtaatcaactatcgtctccttctttatagtggcgcggtgtctcacacaaaaatattcgccaaagctgtgcgttgagcacgatttataatgttgagagctcggttacgctttcataacattttcattcgaaaatcgcgcgataggtaacaattcgggaacattccccagaaatgatattcaggctaccactacactatcactatcaggaaacgagatatggtcatgcgtaggtttacaccgtggttactggccctcgccttaagcggatgtagcatcctgcagggtacgccggaggcgccgccgccggcaagcgatcatccgcaggagattcgtcgcaatcagactgagggcctgcaaaagataggtaccgtcagcgtgctgatgtacggttcgccgatggatgtcgagaccgcgttgaaagccaaagcagaagccgcaaaagcggattactacgtcatcgttatgatcgatgacaccatggttcccggccagtggtattcgcaagcgattctgtatcataaatagcagcgtgatgcgtttttaaccagctttacactgctttgtccattcacgttctcctgcgcataataacgttcggccagccttttggcagaacgttagcaaacggactgccctcgggattacgtgaaatggagctgacgatgaaacgatcactgaccttacccagcctgttgctgaccaccgcgacggccaatacttccgctcagtcagccgaattcgccagtgcggattgcgtcactggcctgaacgaaattggtctgatttccgtcaataatatctccggcagtcagcaggatgtcgagcacgccattgccgttaaagccgatgagcagggggcttcctggtatcgtatcgttcagatgtatgaagagccgcagccggatagctggcgggtgcaggccattctctacgcctgagacggttgtcgtccgcgccccatcgcccgtagcagcgcatcgtccagcagctgcgcgtccaggcggatacctcctcgcggatccagcatcattcggcaccacgcctgggccagcggcggcgacgcaaagcgcagcatctgcgcacccgcccccaggcaatataccagacgcgctatttctcgtccctgcgcctcaaccggccgccgtaagagttgctgaagctgtcgccatgcgcggtcataatgccggttctgccctttaacatcagcacactctaccgccagcatttctaacgccgcaggctgcttgctaagcacccgcatcacgtcgagacacataatattgccggagccttcccagatactattaaccggcatctcacggtataaacgcgggagttcgctctcttcgcaataaccgataccgcccagcacttccatcgcctcggcgacaaacggtataccggcgcgacagatagcaaacttggcagccggggtaaataaccgggcccatagcacttcatctgcattgtcgcgccgatcccaggcgcgggccagacggaacagaaaagcggtttgtccttcaagacgcagcgccatctggcccagcacctgacgcatcatcggctgatcggccagattcttgctgaacgcctggcgctgcagcgcgtggtacagcgccaccgaataagcacggcgcatcagagcatggctgccggccgcgcagtcaaagcgggtcagcgcacccattttaaggatttgccgcacgccatcgccctcttcgcccaccagccatccgcaggcgtcaaagaactccacttcgctgctggcgttggatcgattgcctaatttatctttcagcctctccaggcgaacgccattacgctgaccatcgggtagaaagcgcggcacaaagaagcaggagagcccacccgacgcctgagccaggaccagatgcgcatcgctctgcggcaccgagaagaaccatttatgtcccactagtcgatagaatccctccgccgtttttgtcgctcgggtggtattactgagaacatcggaaccgccctgtttttcggtcattcccataccaatcagcaacccacgcttctgatcccccggcgccagatgcgggtcatagcggtcgctgagcaacggcggcagccagtcgctaaaggcggtgggcagcgcgcgctgcagcagcggcgtagcggcgaaggtcatggttatcgggcataacgttcccgcctccacctgggcatgcagcataaaacgggcggtacgggcaacaaacgagcccgcgcgggcatcctcctgccacgcaagattatgcacccggttggcgcacagtccctgcatcagcagatgccaggcgggatgaaaccggacgtcatccagccgggcgccggtagcgtcgtagcgtagcagttcgggcgggttgctattggccagtcgtcccaactccagcgattccgccgtacccaactgctggccgatgctggcgagcagatcgccatcccagccggcgccttcacgcactaccgcctcataaagcgcggtatcggacaaaaacagattgctgttacacaacggcgtcggttgattaaatacggtatgcgtttgccagtgcatgatgtctccctccgtcaatggctctgacagtaagtatggtcgcctgcatagacggtcacaaaaaaaccgctacgccttcgtgaagcccatcacaggcataagaatttaaaatttcctcagtaaaaatgtatggaataatttattcattcgttactgttttgtatcagtcggggctttctatgcacaccgccagcacaacatcagcagcgcaaaaacgcgcgctgatcgccggttctataggtaactttattgaatggtacgagttcgcggtctatggctttctggcgaccgtgattgcgaaaaacttcttccagctgaacggggaagcgccgctgaccgggctgattctgacttacgcctctttcgcgattgcgttcttctttcgcccgctgggcgccatcgtttttggccgcctcggcgaccgtattggccgcaagccgacgctgattatcgtattggtactgatgacgctcgccaccacggctatcggactggtgccggtttacgccagcatcggtattgccgcgccactcattctgaccggattacgtattcttcaggggctttttgccggcggcgagtacggcggggcggtatcgctgatgaccgagttcgcccctaaaggtaagcgtgggctgtatggcgcatggcaatcttttaccgtggcattagggttgctggcaggcgcaggcgtggtcgcgctgatttccgccgcgcttagccccgaatcgctgcatgactggggctggcgcatccccttcttcctcgccataccgatgggcatcgtcgcgctgtggctacgcgttaaaatggaagagacgccgggctttttacgccagcagcaggctacgccgcccgcggaaacccgcgccagtttgcgccagacgctcaaagcgattctcaccggcattggccggttgatggtatggtcggcggcgggctatacctacctggtgatcatgccttcgtacctccagtccgcgctgcacaccggttttaatcaggcgttgctgatcgcggtgatctctaatattggcttcgccatcaccatcttgcctgccgggatgctcagcgataagtggggacgtcggcgggtgatggtcgcggctgcggtattgctgctggtactggcgctaccgctgctgaaaatattgcaggcggaaagcagtacgctactggtgaaaggtatagtggtgctgattgcgggtggactggtgggaattctggccgggcctgggccggcgatgctggcggagatgttccctaccagagtgcgttataccggactgggtttagcctattcgctttcgaatgccgtcttctccggctgcgccgggttgattattaccggcctgattaaacagaccggtaatctggacattccggcgtactacgtaatggcgacggccgtcgtcagtattgccgcgctgatgacgctcaataagaacgatcatctgcgggcgctggacgactaaactagctcgccagcagcggcttagctgcgctggcgcaccgcttcaaacaggcaaataccggtggcgacggagacgttcagcgaagagacgctacccgccatcgggatgctgatcagttcatcacaatgctcgcgggtcaaacgacgcataccttcgccttctgcccccatcaccagcgccatcgggccggtcattttgctctggaacagcgtatggtcggcttcgccggcggtaccaacgatccacacgttttcttcctgcagcagacgcatagtgcgcgccagattggtgacgcggatcagcggcacgctttccgccgcgccgcaggcgactttcttcgccgtagcgttgagctgagcggaacgatcgcgcggcacgatcaccgcatgcacgccggcggcgtcggcgctacgcaggcaggcgccgaggttgtgcggatcggtgacgccgtcgaggatcagcaggaacggttgatcgaactgcgccagcagatccggcagatcgttttcctgatactgacgtcccggcttcacgcgggcaataatgccctggtgcaccgcgccttcgcttttctcatcgaggaactggcggctggcaacctgaatcaccacgccctgcgcttcaagggcatggatcagcggcagcagacgcttatcctcacggcctttcagaataaaaacttcctgaaaacgctcaggtgcgcgttccagcagtgcctgcaccgcatggatgccgtaaatcatttcactcattgatgtactcgttttaggttctgttatccgccccttcaccccaccccagcaggcttcagggtgaaggggcgtcaatcactcggcgatcttctttttcgccgcgcgcttggctttggttgccgcggcgattttctgcgttttcgccgatggctttttcgctttcttttcacctttcggtttggctttagctttgtctttttccttacggaaggcgctatccggctcaaagtttacctgcttgccaacctgacgacgacggccgccgccgtttttacccggcgcgcccttcttcgctttttcgcgtgcggttttgccgacattacgcgggccgcgttcgctggaaatcaagctgaaatcaatcttacgctcatccatattaaccgcttcgacccgcacttccacacggtcgcccaggcggtaagtctggccgccggactcgccaatcagccgctgtcctacctgatcgaagcgatagtagtcattatccagcgaggagacatgtaccaggccatcgataaacagatcgttcaggcgaacgaagaagccaaagccggtgacgctggcgatcacgcctgagaaggtgttgcccacctgatcctgcatgaagtcgcacttcagccagtcggatacttcgcgcgtcgcttcatcggcgcggcgctcggtcatcgaacagtgctcgcccagctgcagcatctcttccatgctgtaatgccagccgccggtctcggtgctattgcctttatgaccctgctccttcgccagtaaatacttaatagcgcgatgcagcgacaggtcaggataacgacggatcggcgaggtgaagtgggcgtatgactgcagcgccaggccgaagtggccgcggttttccggatcgtagaccgcctgcttcatagaacgcagcagcatcgtctgcagcatttccgcatccgggcgatcggcgatggaagttagtagttcggcgtaatcgcgcggctccggcttgttgccgcccggtagctccagccccagttccgccagcacggtacggaaggcggtaatcgcttcggtacttggcttatcatgaatacggaacagcgccggctcctgcgctttctcaacgaaacgcgccgcggagatgttagccaggatcatgcactcttcaatcagcttgtgcgcatcgttacgctgagtctgttcaatacgctcgatacggcgctcggcgttgaaaatgaatttagcttcttcactttcaaatgagataccgccgcgctcttcacgggcgccgtccagcaccttgtagaggttatgtagctcttcaatatgcttcaccagcggcgcatagtgctcgcgtagctcctgatcgccttgcagcatatgccaaaccttggtgtaggtcagacgggcgtgagagctcatcaccgcttcatagaatttaaaaccggtcagacggccttttgacgatatcgtcatttcgcagaccatacacaggcggtcgacctgtgggttcaacgaacacaggccgttagacagcacctccggcagcatcggtacgacctgcgaagggaagtagactgacgtcccgcggctgcgcgcttcgccgtccagcggcgtaccaggacgcacgtagtagctcacgtcggcgatagctacccacagacgccagccgccgccgcgttttttctcgcagtacaccgcgtcatcaaagtcgcgggcatcttcgccgtcaatagtgaccagcggcagagagcgcaaatcgacacgcccggctttcgcctcttccggcacctgctctttgagaccagaaacctgtttttctaccgccggcggccagacgtaggggatctcatgggtacgcagcgccatatcaacggccatgccggtgcccatgttgtcgcccagcacttcaactattttaccgaccgccttggtacggcgggttggacgctgggtcagctcgaccaccaccacgtagcccatgcgcgcgcccatgatctcttcaggcgggatcaggatatcgaagctcagtcgactatcgtccggcaccacgaagcccacgccggcatcggtgaagtaacggccgacgatctggctggttttcggcaccagaacgcggacgatgcgcgcttcgcgacggcccttacggtccgcgcccagcggctgggccagcacctggtcgccatgaatacacattttcatctgttctgatgaaagatacaggtcgtctttgcgcccttcaacgcgtaaaaagccgtagccgtcgcggtggccaataacgacgcctttgactaaatcgagacgttccgggagggcatagcactgacggcgagtgaacaccaactggccatcgcgttccattgcacgcaggcggcgacgcagcgcttcggtttgttcttcgccctcaatatttaactcaatcgccagctcgtcgcggctggccggtttttcacgtttggttaaatgttcgaggataaattcccggctcgggatcggattcgcgtacttctcagcttcgcgttcctggaatggatcttgtgacatatcggttcctccgttgtcatctccgatgaaagtctctgtgtggcgcacgccgccgctttgttggttctctttacgctgcggcgcaaatcactcagcgcttttcttccaccagtaataatttatatagcggttgattcttttcaaccaaatcggccagcgtgtagttatccagttccttcaggaaactttgcgcggcttcggcaagtgcctgtttcaggcggcaagcgggagtaatgtggcaaaattcgctgctgcaattcaccagcgatagcggctccagatcgcgcacaacatcacccacacgaatcattttagccggcttgccaaggcgaatcccccattctttccccgcacggccgtcacgtagccgacacggcttaactgattgattattttgaccatatgattacgggaaacgccatagacatccgtcacctcggaaatactggtcattcggtcatccggcaacgacgccatgtaaatcagcgcgcgtaatccgtaatcggtgaaactcgttaactgcacatcaacctcagggtaaggggaaagcggtgaatccgcgggtattaactctattgatgataaaccagccagcgctcaggccgctaatttatttgaaatggggcgggcgaactgcaaaaacaagggcgcccgaacggcgcccctggatgatgattacgcgtcgaacgggtcgcgcagaatcatagtctcagtacggtcaggaccggtagagatgatatcaaccggcacgccggtcagctcttcaatacgctggatgtagttcaacgctgcctgcggcagaccgctgcgctctttcacaccgaaggtggtttcggaccaacccggcatggtttcgtagataggctcgataccttcccaattgtcggcagccagcggagtggtggtcacttcacggccgtccggcatacggtagccgacgcagattttcacttctttcaggccgtccaggacgtccagtttggtcaggcagaagccggacagggagttaatctgcaccgcgcggcgtaccgcgacagcgtccagccagccggtacgacgacgacggccggtagtggcgccgaattcgttaccctgcttgcacaggaactcgccggtttcatcaaacagctcagtcgggaacgggcccgcgcctacgcgagtcgagtaagctttgatgatacccagaacgtaatccacataacgcgggcccaggccggaaccggtcgccacgccaccagcagtggtgttagaggaagttacatacggataggtaccgtggtcgatatccagcagcgtgccctgcgcgccttcgaacatcacgaagtcgccgcgctgacgcgcctgatccagcagatcggaaacatcaacgaccatgccggtgaggatgtcggcaatcgccatcacatcgtccagcactttctggtagtcaaccgcttctgctttatagaagttcaccaactggaagttgtgatattccatcacttctttcagtttgtcagcgaaggtggctttatcaaacaggtcgccaacgcgcaggccgcgacgagcgactttatcttcgtaagccgggccgataccgcgaccggttgtaccgatagctttcgcaccgcgtgctttctcacgcgccacgtccagcgcgacgtgataatcgaggataagcgggcaggcttcggacagcagcagacgctcacgaacagggataccacggtcttccagacctttcatctctttcatcaacgcagccggagacagcacaacaccgttaccgatgatgctggttacattctcgcggagaatacctgatggaataagatggaggacggttttttcaccgttgattacgagagtatggcctgcgttatggccaccctggtagcgcacaacatatttagcccgttctgtcaggagatcgacgatcttccctttaccttcgtcaccccattgggtgcccagtacgacgacgttgttacccattttttcaaaatcaccgtttgcttaaaaatggattctaccatcgctttttcagagttacagcactttttgcactcaaaatgagggtaatccgactattttttgatcagccaatcgatttcctcaacatgtagtagatgacaatgccagccaccacaagaccgccgccaaagcgacgcaataaattatccggcagttggctcatggtcgctaccatcttgcgccaggcgcggggataaagcagtgggccaagaccttcgagaactaaaaccagcgccagtgccagccaaattgttgcattcattattgatgacccttatagaaaaacaaaaccgccgccagttggcgccggtgagtattaccgcaaaccctttttctttcttcacattctccggcatttcacaggcaatatgaaaccactagctgagagaaaaatcacaatctatggcataaaaaaaggcgcctcttgcaaggcgccttctgatttcacactggcccggcttatttacgcacggaatccggtgacttcatgtaacggaagaaatcgctatccgggctgagaaccatcacgtcctggttgctctggaagctcttctcataggcgcgcaggctacggataaaggcatagaagcccggatcctgactgaacgcatcggcaaacagttttgccgactcggcatcgccttcaccacgcagaatacgcccttgacgctcggcttccgccagggtcttggtcacttcatagtccgcggtcgcgcgcagtttttccgcttcttcctgaccttgtgaacgatggcgacgagcaaccgcttcacgctcggcgcgcatacggttgtagatcgcttcagacacttcagccggcaggttgatctgcttgatacgtacgtcaacgacttcaatacccagcgccgccatactgttcgggttgatcacctgaaccttaccgttagtttcagcttctacccgctctgccgctttagcgatagcgtcatcggctgccggcgtcgagacttcatcttccgtacctgcagaaccggagttcagcgcatcacgcacttccagggtcaaacgaccgcgggaatcagtcacgatgtctttcacgtccagacgaccaatctcagagcgcagacggtcagagaacttacgcttcagcagaacttcggcctgggagatgtcgccgccgccagtcgccagatagtaacgactgaagtcactgatgcgccacttgatataggagtcaacgatcaggtctttcttctctttagtaacaaagcggtcggcctggttgtccatggtctggatacgcgcatccagcattttcacggattcaataaacgggatcttgaagtgcagacccggcgcatacaccagcggcttgttctcatcgtcgcgcagaactttgccgaagcgcagcgtaatgccacgctcgccttctttcaccacgaagacagacatgtagagcactaccagcacgacgacaatgatcgcgataacagatttacgcatcgttattcccctgacgctggtagtcgttacgctgcgcgttggcgcggcgttggtccataatggtacccccggttgaactcgaggttgatgaggtgctggcgctgcttgagctggacgcaggcggcaggcgcagcagatcgcttgcgccactgctatcgctctttgccggcgcgccagtggcgcctttcagcatctgatccaatggcagaaccatcaggttgccgcccttgctgtcattaaccagcactttgcgggtatggctcagcactttttccatggtttcgatatacagacgctcgcgggtaatttccggcgcggctttatattccggcaggatcttcgcaaagcgagcgacttcaccctgtgcttccagtacggtctgggttttatacgcacgcgcctcttcgaggatacgctgcgcctgaccgttcgcacgcggctgaacttcgttggtataagcttccgcttcgcggatgtactgctgctcgttctcacgcgcggcaatggcatcatcaaacgcggccttaacctcttccggcggacgcgccgtctggaagttaacgtccagcagggtgatacccatgttgtacggacgaatggtctcttccagctcgcgctgggtatcgctacggataacggtacgaccttcggtcaggatacggtccatggtgtacttaccaatcacgccgcgcagggcgctgtcggtggcctgacgcagactatcgtcggcgctggtcacgctaaacaggtagcgctccggatcggtcacccggtactgtacgttcatctcaacgcgcacaacgttctcatcggaagtcagcatgacgccggatgctgccagttcgcgaaccgactcgacgttcaccgcttgcacattatcgacaaaggttggcttccagttcagacctggctcaaccagatggctgaacttgccaaagcgtgtcaccacaccacgttccgcttccttgatggtatagaaaccgctggctgcccagataatcaccgccgctgcagcaacgatgccgacaatgcgcccgcccatcgggccgcgcggcccctgcgtcacattaccgccaccctggccgcctttaccgccgccgagaccgccaagttttttgcttaacttgcggaagatatcatccagatcgggcggcccctgatcgcgaccgcctttgttgccatttccctcagagttgccgccattcttgctgcttccccacgggtcgcggtcctgtccgttattaccgggctgattccacgccatgtatatgctccatatttgtttttgatatccccacaggggttaatatcttcaggccaggtcaaaccacgtagtcgaccaacgcaggctcttgtttgcagaggcgacgccagtccacgatgggcatgcgcacttgcaggcttacgctgccgtcatcctccatccactctttttctatcgcctgaagctgatagaaccggcttctcagacgaccttcctgcggcggtaaacgcaacgtatgctgcgccacttcgccggaaagacgctctgttaacgcctgaaaaagcagtggtacgccaatcccggtctgggcggagagccagacccgaatcggtttattctcttcatcccgatcgatgcgcggttcaaaatcgtcaagcacatcgattttgttcatcaccagcaatgacgggatttcatcggcctcgatttcagcaaggaccgtatttactgcatcaatattttcctgcacgcggacatccgccgcgtcgatcacgtgcagcagcagcgtcgcctgacgcgtctcctgcaacgtcgctttaaacgccgccaccagatcgtgcggcagatgacgaataaagcctacggtatcagccagtaccgtttcgccgacgtcagtgacgttaatacggcgcagcgtcgggtccagggtggcgaacaactggtccgcggcatagacttccgcttcggttatctggttaaacagcgttgattttccggcgttggtatatcccaccagcgaaacggtcgggatatcggccttggcgcgtgaccgccgaccttgctcgcgctgtttttctactttttccagtcgcgacaggatctgcataatacggttacgcagcaatcgacggtcggtttcgagctgggtttccccggtccgcgcaaacctatcccgcccttctgcctttcaaggtgggtccagccgcgcaccagacgcgtggccagatggcgcagttgcgccagctcaacctgcagtttcccttcgtgggtacgcgcccgttgggcaaaaatatctaaaatcagaccggtgcgatcgataacccggcattcgcatagctgctccaggttacgttcctgggccggactcaaggcatgatcgaacagcacgaccgaggcgccggtcgcttttacggcttccgcaatttcaacagccttaccttcaccaacaaaatacttcgggtgcggtgctttacggctaccggtaatcacctgcattgcttcgacaccggcggaagagaccagggattcaaactcctggagatcctccatatctttgtcttgcgaaaaatagatgtgtaccagtaccgcctgctcaccggcatcataacggtcaaacaagcgtaaaccccttataaaataccagcggggaacgcagaaaacctggctccccgacgtggaaaaacagcattagccttattcggcgtcgtcgctgtcttgctgcggcgcagaagaaccttgcgcgctaccaccgtggtgatagttgtttgcaccgccgccagcattattgctgtggtgagacaccggacgggacggaacaacagtagaaattgcgtgcttatagaccatctggctgaccgtgttcttcaacaggatcacgaactgatcgaaagactcaatttgcccttgcagcttaataccattcaccaaataaatagaaaccggaacacgttcccgacgcaaagcgttcaggaacggatcttgtaaagattgccccttagccattctctcttttccttatatgtatgcttgttttgtactcagaaccttacgattcttaaaaaaaattacgcacgataccgttcaattgtacacgttcagttctggctagcaccaacaacctgtaatactttgttgagcgcttgttcaggttgctcactgtctaaccagtgaacatcttcccaaccgcgcagccaggtgacctgacgtttagctaactgtctcgtcgcgcaaacacctcgataaaccatttcatcatacgggacctcgccttcaaggtatgaccacatctggcggtatccgacacaacgaatggaaggcatatccgtatgcaaatctccacgggcaaatagcgcccgcacttctgcttcaaaacctgaagccaacatctgatgaaaacgctgctcaatgcgttgatgtagcagttcacggctcgccggggcgatggcgaactgatgcacctgatacggcagagcctctcctgacgtttgcgtcagttccgttaaagttttacccgaaatgaaaaaaacttccagtgctcgggaaagtctttgcggatcatttggatgaatacgcgcggcggccacgggatcgatgtcctgtaactgccggtgcaatgcgtgccacccctgctctgctgcttgttgctcaattctggccctgactgcgggatccgccgaaggcagcggcgataacccttccaacaacgctttgaagtacaacattgttccgccgaccagcagcgggatgcgcccggcggcgacgatatccgccatttccgccaacgcatcgcgacggaaatccgccgccgagtacgactctgccggatcaaggatatccagcaaccgatgcggcgcagcgctaagctccgcggcatcgggtttggccgtgccgatatccattcctcgatagatgagggcggaatcaacgctaatcaactctactggcaaaactttacgcaaggcgatagctaatgcggttttaccggaggccgtcggcccattaaaaaaattgccttaggcaggctcgcctcagttacatcactcatctttcagggctgtcattgccgaatgtaaatcaacaggttgtaacagaccacccggcggcgctttaatcagctgcggacataaacgctcaacgtccgccaacacggaaatcgcctgcgccatactccactgcgcgtgctcgctcgccagattacgcgccatccactgggcgatgtcgccgacgtcgaatgccgttagctgcgccaggtagcctatcagttcaggaatcaagatttgtaaattttgttgtcttaagggtaaaggcaccgcgcggaccgtcacgtgctgggcatctgcttgtaaatcgatgcccaattgcgccagcgccggctgcgccttttccagcgccttacgttctgcttcactcactttaaggcgtagcgggataagcagcggctgcgcgcaaaccgcttcagcgcccggcgttagctgcgcctgacgcagccaacgctccgccaccggcagcgccagcaacgccaatgtgccgccgcgctcgagcagcgcgcaatcgctgccgataatagtcagcacccggccaaagctttggctgtgggctgccaggctttccgcaggcgccggcgcaacgggctgcttttccaccgccggggtttgcagcagttgacggtaaagcgcccctgctgtttttggtaacccggctgcgcgtggggccagctggcgccgcctgcgctatagccgccgctggaggcggcaggttcgcgcggcgcgcgggtatcataaccagccgccggttcccgggcaggcgatgggcgagcgaaatggttagcgcctgccgctacgcggttttccggcacctgccgcggcgcgggtgcttcgtcttcttccaccagcggcgcatccagttgctgctgtagcacgcttagtacgccttgatagataaaatcatgcaccagccgtgattgatggaaacgtacttcgtgcttcgccggatgcacgttgacatcaacctgatgcggatcaatctccagatacagtacaaacgccggctgctggtcagcgcccagcttgtcttcacaggcctggcgaatggcatgattgatcagccggtcgcgcatcatacgtccgttgacgtagcagtactggatttccgctaacgccggattggtatgcaacggatcggcaacccagccgcgcagtgtcagatcgccatgctgccactcaatggccaacgcgtgttccaaaaacgccgcgccgcaaatcgaaccgagtcggcgttcacgcgggccgccttccgccactgcgcgatactggcgcatcattttgccgttatggctgagattaatcgtcacatcgaaacgcgccaacgcgatgcggcggacaatttcatcaatatgattaaactcggttttttcggtgcgcatgaacttgcgccgcgcggggtgttgtaaaacagatccagaacttccagcgtggtgcctatcggatgcgccgccggtttcaccgtcaccgcctggtcgcgcccttcagcataagcctgccatgcctcttgctgctccgcggtacgcgaagtcagcgtcaggcgggcgacggaactgatactggccaacgcttcaccgcgaaagccaaggctgatgatcgcctcaaggtcatccagcgaggcgattttactggtagcgtgacgagccagcgccagggccagctcatcttttttgatcccacagccgttatcgcgaatacggataagcttcgcgccgccgcgttcgatatcaatgtcgatacgggttgcgccggcatcaaggctgttctcaaccagctccttcactaccgacgccggacgttccaccacctcgccggcggcaatctggttggcgagctgcggcggtagaacctgaatcggcatgaccttctccttagttaatcaacgtcccgccaggcgaactggcgctggcggtttgcgcggccgtgccgcgcggcgctgattgcagcgggtgctgcatataatagttacgcagccctttataaatcgcctctgcaatctgctgttggtaatcatcgctacccagcaggcgctcttcgccgttattactgataaagccggtttcgacgaggatcgacggaatatccggcgagcgcagaacgccaaggctggcatgctccgggcggcgtttatggagattaccgacccgctgcagctggctcagtacatcggtcgccacatcataaccgacgcgctgggaatggccgaactgtaaatccagcaccgcctggctcagataaggatccgactggctattcgccagcacgtcgcccgcaccgcccaaaagttcggattgtttctcatgctgttcaagccagccggccatttcgctgttagcgcggcggttagagagcacccacaccgatgcgccggtcgcgtcgcggttcggagccgcatcggcatggatagagaccaggaaattggcgttttgtttccgcgccacgtccgaacgccccatgaccgagatgaagtagtcaccgttgcgggttagcaccggtttaaactgcggatcgtcgttgagcaacgcccgtagtttatgggcgatagcaatcgtgacgtttttctctttggtgccgcccggtccgatggcgccaggatcctgaccgccgtgaccggcatcaatggcgataataattttatcgtcagaagagacggtacgcgccgccggacgggtaatagtctggttgttggtcatcgccggctgactgctggtcaccaccgtggttctgtcgctgccagaatttttaaacggattgcgcggcggcgtgctcggacgcgacgccactaccggcgcttcgacccgtttcgctatcactggcggcggaggtggcggcggcacgtcggcgttaatggtaaagacgacggtatagttggcgccattttgctgcttcaccgcccgcgttttaccatcttccgtcagatcgaccaacagacgcagcgattgcgtatcctgaggcgagccggaacgaatgctcttgaccagattattaccgctaaactgcagcggtagcccctgaagtacgccggtttgtttgatatccaacgccacaacccgcttaccttgcggggtgaaggaatattcaggatcgccgacaaaacttagcgtgatgcgggcctgccgatcgccgtttgagacctggatatcggataaacttgccgcggatgcctgagtgccgaacagcatcagagcggcggccagccaactggtaatacgatgcttcatcccgtcatcctttaggctaaatggctaaacgcgccaataaagactcacccaatgaagagaccgccgttacgcgcgcctcacgcccttgcgcctggtaatccaggtgaatttcgacatccgggtcaggcagtacacccgcgccttgttgcggccattccaccaggcagatggcatcgttagcgaagtaatcgcggatccccataaattcgagttcctcaggatccgccagccggtagaggtcgaagtgatacaccatcagattatcgagggtataaggctccaccagcgtataagttgggcttttgacattgccgcggtggccaagggcctgcagaaaaccgcggctgaaggtggttttacccgcgcctaaatcgccatacagatagataaccgtcgcgccgctacaggcctgcgctacgcggttgccaaggtctaatgtcgcctgctcgtcgggtaaaggaatcacacggttaatcatggtctaggtcaatcacatccgggttaacaacacgcctcagcgtgcaaaaaagatcggtcgccagcatcccgcgggcaccatctctggcggccagccggtctgcggcttcgccgtgcgccacgcagcctgcgcaagcggcatcatatggggtcagcccctgtcccaacagcgcggcgataatgccggtgagcacatcgcccatcccgccgctggccattccgggattaccggcatcaatgataccgatttcacccgcgttattcgccacgacggttcctgcgccttttagcaccaccactccgccataccgttttaccagacgttgtacagaatgtaagcgatcgctttcaatttctgccacgctgatattcaataaacgggcggcttcgccgggatgcggggttaacacgcgattgtgacgtttatcgggattgattgccagcaggttcaacgcgtcggcatcccagaccatcggtttgcgaaaattctctacctgccgcagcgccgctttccccactcgctttgcccaagaccgggccaatcgccacgacatctgcccactccagactctcggtaagagagtcatcgttcagctcatggaccatcaattccggcctggcagtcacaatgcccgcgatattttccgccctggtcagcacgcgtactaaacccgcgccggcacgtagagcggcctcacccgccatacgaatggcgccagcggtgccgcgatcgccgccaataatcaccagccgaccatgcgagcctttatgcgacgtcgggcgacgcggcggcagccagcctgccagttgcgctgcggaaaaacggcgaatagcggtgttttgcccggcaagccagcgctccagcccgagcgcatgatgatgtaagcgtccgacgacgtcgcgggcgttgccggtcagtagtccgggttttagcgcgataaacgtcagggtatgggcggcgtggatcaccgcgccaggcgtcgcgccggtttgtgcgtccagcccggaggggatatcaagcgcaataaccggggcgggataggcgttcgccagttcaatcagcccggcgacgttagcgcgcggcgcgctatgcaggccggtgccgagcagcccgtcaataatcaatgagatatcatccggccagccgctatcggcggcgtggatgacgccgccggcattgagccactcttcccgcgcggcctgtgcctcttccgggagcggcttatcgctttccaacgccagtagggttaccgcgatgccttgcgcctgcgccagccgcgcgacgacgtagccgtcgccgccgttattgccgtggccgcaaagaattaaccagtgctggctggcgggataaaggcttcgggccagctggaacgccgcctcgccggcgcgccgcatcaattcaaaaagcgtcagcccgagactatccgccgcctctctttccgcctggcgcagcgtctccgctggccacacgatgtgtggtatactgtcagggtttttcgtcattgtatggtccatcatgtcacagcccctcgatctcaatcagttagcgcaacaaatcaaacaatggggcaccgagcttggcttccagcaggtcggtattaccgataccgatctcagcgccagcgagcctaaactacaggcatggctggataaacaataccatggcgaaatggaatggatggctcgccacggcatgatgcgcgcccggccgcatgaactgctgcccggtacgctacgcgtgattagcgtgcgcatgaactacctgcccgccaatgctgctttcgccagcaccctgaaagaccccacgctgggttacgtcagccgttatgccctggggcgtgattatcataagctgctacgtaaccgcctgaaaaaactcggcgagatgattcaggaacagtgtgcttcgctcaattttagaccgtttgtcgattccgcgcctatcctggagcggcccatcgctgaaaaagcggggcttggctggacaggtaagcactcacttatcttaagccgcgacgccggatcgtttttcttcctgggcgagctgcttatcgatctgccactgcctgtagaccagccggttgccgaagagtgcggacgttgtgtcgcctgtatgactatctgcccgaccggcgccatcgtcgagccctataccgtcgacgcgcggcgctgcatctcctatctaaccatcgagctggaaggcgccatcccggaagaatttcgtccgcttatcggcaaccgtatttacggctgcgatgattgccagttgatttgtccgtggaaccgtttttcacagcttaccaatgaagaggacttcagcccgcgtaaagcgcttcatgcgccgcagctgattgagctgttcgcctggagcgaagcctggttcctgaaagtcactgagggatcggcgatacgccgtatcggtcacttacgctggctacgcaatatcgccgtcgcgctcggtaatgccccgtggaatgaagccaatctggcagcgctggaaagtcgccgaggtgagcacccacttctcgatgaacacattgaatgggcggttgcgcagcagatcgaaaagcgaaatgccaacgttgtcgaagtacagtcgccgcagaaactacgcctggtccgggtggtcgagaaaggattgccacgcgacgcctgattcattcacaggctgtgaataaaaacaaaaacacattgcgtttcaacgggcagacgtacgtcaagtgatcgaattaacagtttgaaatgaaatttaaatgttaaatttcaatcagatacaataatactatttacaaagtgaagcatttatcgcgccgtcagccaaacgatagcctgtggataactctgtttacagtatttttagataggcaatgaaaatcatccccggcgcgatttcgcactgtggataaattggataaaggaagaaatttggagcgggaaacgagactcgaactcgcgaccccgaccttggcaaggtcgtgctctaccaactgagctattcccgcttacatcggttttcaatttacctgctggtacctgaaaactatgctttggtatggtgtgtctttcaaattttggagcgggaaacgagactcgaactcgcgaccccgaccttggcaaggtcgtgctctaccaactgagctattcccgcttacatcggttttcaatttacctgctggtacctgaaaactatgttttggtatggtgctgctttcaaattttggagcgggaaacgagactcgaactcgcgaccccgaccttggcaaggtcgtgctctaccaactgagctattcccgcgttactgctttttgccatatttcgatggcgtcgtaatttgcatttctgcgtcgttacgggaggcgcattatacgagaattcgattcacctgcaaccccctggcgagcactttttttcgttttttgtgtgaatggacattttctcgccatacagcccactgaattgtataaataaccgccataattagcaaaatatctttttccccccgcgcgaatggcgcaaaatcgcccgcatgacaccgcggaggctatccgcgaaaaggtccaccatgacgacaatcagggattcagaatgaaaaaagcgctttccgtcctgctgctgaccacatcgttcatcggaacggcttctgctgaggcccttcattttggcaccacaaccgccaatccgccgtttgagaccatcaaaggcaaaggccaaccaacaggtttcgacattgatttggccaatgcgctgtgtaaacagatgcaggcggaatgcaaattcacgcctcagcgttttgatacgctcattccggcgctgcgctttaaaaagttcgacgccattatcgccggcattgaagtgttgccgatgcgtgaaaagcaggttgccttcactcagccttatcgccaggagctctccggcgtggtggtcacggcaaaagacgccgcccacgggtttgccgacctgcagggtaaaaagctcgccgtggtcaaaggcagcgttcatcagcgttatctacacgataagcaaaaaggcattcaaaccgtcgcctttgacagcgatagcgacgcgctggcggcgttgaaaagcggcgaagtcgacggcgcgatcggcgatttagcgacgatgggccagtggctggcggataatcctggttacgccgagatgaaagagcgcgccaccgacccggcctactacggcaaacaatatgccatcgcggtacgcaaagatgatccggagttgcttaagcagattaacgacgcgctggaggtcgtgaaggcgtcgccggagttccagcagatggaacaaaagtggtttaattaacgcagtaaaacgacggggccatgacggccccgtttacgcttcagagcttaataaaatgctcgcgataataggctaactcggcgacggattcacggatatcatccatggcctggtgagtaccctgttttttaaagccatcgaggatttccggcttccagcggcgcgccagctctttcagagtgctgacgtcgagatagcgataatggaagtaagcttccagttccggcatatatttgaacaggaagcggcggtcctgaccgatgctgttgccacagattggcgatttccctgccggcacccactgcttgagaaactcaatagtggccagttccgcttcgcggtcgcccacggtactggccttcacgcgatcgaccagcccgctgccggtatgagtacgcacgttccattcgtccatcagcgccaactgagcatcagactggtgcacggcaatggtcgggccttctgccagaatattcagattcgcgtcggtgaccagggtggcgatttcgataatgcgatcgcgctcgggatccagccccgtcatctcaagatcgatccaaatcaggttgttttcatctgcactcatgctattttccacccttcttgcgtgactatattcatctaaaatagcgtgtatcatagaggttttgccccatcagggcgaccaggagccagttcgattgagtaaaaataagctctccaaaggccagcagcgccgcgtcaaggccaaccaccaacgccgcctgaaaacgacttcggagaaggccgactacgatgacaacctgtttggcgagccttcagaaggcatcgtcatcagccgttttggtatgcatgccgatgtcgaatccgcggatggcactacccaccgctgcaacattcgccggaccattcgttctctggtgaccggcgaccgcgtggtctggcggccaggtaaaaacgcagccgacggggtcaacgtcaaaggtatcgtcgaagcggtacatgaacgcgcctcggtgctgacgcgcccggacttttacgacggtgtgaagcctatcgcggcaaatatcgaccaaatcgtggtggtttcggccattttacccgaactatcgctcaatattatcgaccgctatctggtggcctgcgaagcgcagaatatcgaaccgctgctggtactgaataagatagacctgctggacgatgacggcatggccttcgtcaacgagcagatggatatctatcgccagatcggttatccggtattgatggtgtccagccatactcaggacggcctgaagccgcttgaagaggcgctgaccgggcgcatcagtatttttgccggccagtccggggtgggtaaatccagcctgctgaacacgctgctgggactgcgggatgagcaaatcctgacgaacgacgtctccgatgtgtcagggctcggccagcacaccaccaccgccgcgcgtctttatcacttcccgcacggcggcgatgtgatcgactccccgggcgtccgcgagtttggcctgtggcatcttgatgcggaacaaatcaccaacggctttgtcgaattccatgattatttaggccattgcaagtatcgcgactgcaagcacgacaccgatccaggctgcgccattcgcgaagcggtagaaaaaggcgctatcgccgaaagccgtttcgccaactatcaccgcatcctggaaagtatggaacaggtgcaggtaaaaacgcgtaaaagcttttcatcaaccgacgactgacatttaagctgttgtcgctatgcgtactcgctttgccagcaaaacggcgcggatacaattcgctgaagtttacgtatagaatcgtcccccttttcagtaccccgcgccaaagcggggtcaggaacgacaattaacggcctggaggctaccttgttaaactcgtttaaactctcgctacaatatattctgcctaaactgtggctcacccgcctcgcaggctggggggcaagtaaacgagcaggctggctgactaaactggttatcgatctgttcgtcaaatactacaaggtcgatatgaaagaggcgcagaagccagataccgccgcttaccgcactttcaacgacttcttcgtccgcccactgcgtgatgatgtacgcccgctcaacaccgatcccaacgtgctggtgatgccggctgacggcgttatcagccagcttggcgctatcgaagatgacaaaattctgcaggccaaaggccacaattacaccctggaagccctgctggcgggtaactaccagatggctgatctgttccgtaacggtagcttcgccaccacttacctgtcgccgcgcgactatcaccgcgtgcatatgccgtgcaatggtatcctgcgtgagatgatctatgtcccaggcgatctgttctcggtaaaccatctgaccgcgcaaaacgtaccgaacctgtttgcccgcaacgagcgcgtcatctgcctgttcgatactgaattcggcccgatggcgcagattctggtcggcgcaacgattgttggcagcatcgagaccgtctggtccggcaccgtgacgccgccgcgggaaggtattattaaacgctggacctggcctgctggcgaaagcgaaggctccgttgcgctgctgaagggccaggagatgggtcgctttaaactgggctcaacggtgattaacctgtttgcgccaggccaggtgaagctggttgaacaactgcaaagcctgtcagtcaccaaaatcggcgaaccgcttgcaacggccgtagaagctgatatatccgcagaacctacgccgttgccggaagaagagatccgcgccgaacaccgcgccagcccgctggttgacgataaacaagacgaaggttaattcctgacgacaaagggttacgccgtgcgcctgatatacacttttctgttggccttgagcctcagcttcggggcgtacgcagcgacggccccggacgtcaagcaaattacccaggaactggaacaggcgaaggcggcgaaacccgcccagcctgaaaccgtagaggtcctgcaagccgcgttgaatgcgctggaggaacgcaatgcctccgttgagcgtgctcgccagtaccaggatgtcatcgataattttcccaaactgtttcaaacgctccgcgcccagttagcgaatgtcagcgaaacgccgcaccaggtacctaccgccctcaccgccgacgcgctgaatcaggagatcctgcaggtcagcagccagcttctggaagccagccgccaggcgcagcaggagcaggatcgggcgcgggaaatcgccgactcccttaatcaattaccgcagcagcaaaccgacgcccgccgcaagcttaatgagattgaacgtcgcgtcggcgcgcagcccggcaatacgtcgctggcgcaggcgcaaaatctcggtctgcaggcggaatccgcgcgtctgaaagcgctggtcgacgagctggatctggcccaactctcggcgaacaaccgccaggaactgtcgcgcatccgctctgagctggcgcagaaacagagcgaacaactcgatgcctacctacaggcgctgcgtaatcagcagaacagccagcgccaacgcgaagcggaaaaggcgcttgaaagcaccgagctgctggcggaaaacagcgaaaacctgccgccggggatcaccgaccagttcaaaatcaaccgcgaactatcgcaggcgctcaatcagcaggttcagcgactggatctggtggcctcgcagcagcgacaagccactaatcaaacgctccaggtgcgccaggcgctgaacaccctgcgcgaacagtcgcagtggctgggatcatcgaatctactgggcgaagcgctacgcgctcaggtcgcccgtctgccggagcgcccgcgcccacagcagttagatactgaaacggcccagttgcgcgtgcagcgcttgcattacgaagacttgctcagcaagcaggcgcagctacggctgattcgccaggccgacggcgaaccgctcaccgcggaacaaaaccgcatcctgcaggcgcaactgcgtacccagagcgagctgcttaactcgctgctgcgcggcggcgataccttgctgctcgaactgacgaaactgaaagtcgccaacggccagttagaagacgcgctgaaagagattaacgaagcaacccaccgctatctgttctggacctcggacgtcagcccgattggcttctcctggccgctggaagtggtgcaggatctgcgtcgtctgatctctcttgataccatcaaccagctcggcaaggccagcatcatgatgctgaccagcaaagagacgctgttcccgctgtttggcgcgctggtgctggtgggcttcagtatctattcgcgccgccactttacccgcttccttgagcgctccagcgcgcggattggcaaggtgactcaggatcacttctggctgacgctgcgtaccgtgttctggtcaattctggtggcttcgccgctaccggtattgtggatgacgctcggctacggattgcaggcagcctggcccttcccgctggcggtcgccattggcgacggcgtgaccgccaccgtgccgctgctgtgggtagtgatgatttgcgccaccttcgcccggccgaatggattgttcatcgcccacttcggctggccgcgtaaccgcgtcgccaaagccatgcgctactacctgatgagcattggtctgatcgtgccgctgataatggcgctgatcatgtttgataatctcaacgaccgtgaattctcggcctctctgggccgcttatgcttcatgctgatatgcggcgcgctggcgctggttacgctgagcctgaaacacgccgggatcccgctgtatcttgataaagcgggcgacggcgagaacatggtgaaccgtctgctgtggaacctgctgctcggtgcaccgctaatcgcgatgctggcggcggcggtgggctatcttgccacctcgcaggcgctactggcgcgactggaaacctcggttgccatctggttcctgctgctggtggtttaccatattattcgccgttggatgttgattcagcgtcggcgtctggccttcgatcgcgccaaacaccgccgtgcggaaatcctcgcccagcgcgcccgcggcgaagaagataccgcccactccaccagcaccgaaggctcggtcgaagcggaagtcagcgaagtcgacctcgacgccatcagtacccagtccctgcgcctggtccgctcgctgctgatgctgatagccctgctgtcggtgattattctgtggtcggaaattcactcggcattcggcttcctcgaaaatatctcgctatgggatgtgacctccacggtacagggcgtcgaaagtcttgagcccattactcttggcgccgtactgattgccattctggtgctgattatcaccacgcaactggtgcgcaatctcccggcactgctggagctggcgattctgcaacatctggatttgacgccgggtaccggctacgccatcaccaccatcaccaaatatctgttgatgctaattggcgggctggtcggtttctcgatgattggtattgagtggtcgaaactgcagtggctggtggcggcgctcagcgtcggtcttggttttggtctacaggagattttcgccaactttatctccggcctgatcattctgtttgagaaaccgatccgtatcggcgatacggtcactatccgcagcctgaccggtagcgtgacgaaaataaatacccgcgccaccaccatcagcgactgggaccgcaaagagatcattgtgccgaacaaagcgttcatcaccgaacagttcatcaactggtcgctgtcggattcggtcactcgtgtggtgttgactatcccggcacctgcggaagccaacacggaagaggtcacgcagattctgttgaccgccgctcatcgctgctcgctggtgattgataccccggcgccggaagcgtttctcgttgacctacagcaggggattcagattttcgagctgcgtatttacgccgccgagatgggccaccgtatgccgctgcgtcatgagctacatcagctgattctggcgggttaccgcgcgcatggcatcgacatgccattcccgccgttccagatgcgtctggaaagcctggatggcctgcgcagcagccagccgctgaactcagcgggtaaaagcagccgtacgccaggaagtttgtaagcactaactagcccggtgagcgcttcaccgggcattctctttcttaaccctccgccagcgctacctctaccgccgttctctgacgatagttctcgtagatccctagcgccaatagcgagaagaaaatcggcccgcctaccatccacagcgtactattccagtcgccggaatccatcaccggctgaataacggtgaagatattggcgaacgctaccaccagtaccactatcgtcgtcgccagcagcgtacttatgcggcttttgaacatcacaaatggacgatcgagatcggctttggccttaaagaacgggaatgcgatcgccaggaacagatacggcaaagtcatcgagacattagccatcagcgtcagcttgttataaaacgccgaggcggtatcgccgccgaaggagaccagcagaataaacagactcaccagtagacactgtagccacatggcgttagccggcataccgttggcgttgactttggtcatcatcatcggccacagcgctttcggcgtcccctgaataatcgccttcagcggcgaataactcagggtgaagaatgcgccggtataggcaaggaacatcgacagcccggtaatgcgcgcaaaccatacgccggtcagcgccgccgcctgcggcgacagatgaagcgcctgcccaagcgttgcgccaaggctggttatcaacacataggtgatattgccgaggttggtactgtggttgctcaatacctgctgccagttggcgctgacgccccacagcacgatggccagcgagtagccgatcgaaatcaccagtgcggcgataataatgcctttggcaaagttcttttccggcttctcggttttatccaccagcccgccgaccgcttcaatcccgccataggcgaaaatggcgaataccacgaaagacagcatcgccagccctgattgatatcctggattcggcgacgccgtgaaatccagcggttgtgcgaaatggccgccattcagcaacagaatcgccccgctcaccagcagcagtaccagattcaggcacatcaccgcgatgccgccgacggcggtaattttggcaatcttatttatccctttcgccgctaccagcgtcaccagcaccatccagcaggcggccagcacgccaacggtttgcgtcgaggttaagccggcaaaagcccagctctgggttttatccgcgccgaagagaaaggtcgaaaaagggacccaaattttcgccgcggtgctgaccatccacactacataagaggaaaaccacataaaggtgccaataaatgcaaatcgcggcccgacgctgcggttcatccacgaataaatcccgccctcttctttacgatatgccgaacccatctccgccatcattaaggcgaaaggaataaagaaaaacagcgccgagaaaagataaaacggcatcgcgctataacccatcagataaaacgctgaagggctgttggcaaaaccaaacaccgaagtgaagatcattaatatcagcccaatcaggctcatcttcttgatttgttgaggcataaatcgatccaaacgtgagcgtcgccgaacggcgtcgccaggtaagcagaaattgaactcggatcctagcaataatccagtttgaaattgtggttattagggctaatgcagcgggaagaactgtaaaaatctttgaatgaaggggaaaacgctaacggcgggaaacagcttccctctcctcatgaaagggaagcgcagttaatcaggcgcgatcgacggtgaatgagatcacttcgccgatggtctctacacctaacgccagcatcaccaggcgatcgacgcccagcgcgacgccggaacaatccggcaggccggcttccagcgcagccagcagattatagtcgatgggctgctccggcaggccgcgggccgcacgtttgcggttgtcctgctcaaaacgctgctgttgttcgcgcgcgtcggtcaattcatggaagccgttcgccagctccatccccttgtaatagacctcgaagcgctcggcgacgcggtgatcttcggtgctgatctgcgccagcgaagcctggcttgccgggaagtgatagacgaacgtcggacgttctttaccgatgtgcggctccacgcccatggtgaacagcaactgcagcagcgtatcgcgatcttcttcggtatcggcgatattactgagatcgagctttgccgccacttcgcgcagctgggttttatctgccgagagcggatcgatctccagataacgctggaaggcctgttgataagagaggctttccgcgggttggcactcgagcacctgctgcagtaaatcgtcaacttcgttaatcagacgatacatgtcgtagcacggacggtaccactccagcatggtgaactctggattgtggtgacggcccatctcttcattgcgaaagcttcggcacagctgaaataccggcccgcacccggcggccagcagccgcttcatgtggtattccgggctggtcatcagatacagattcagaccctgagagtggccggggccgacgaaacgggtttcaaacgggaacatgtggatatcggtcaccgttgcctgactcatacaaggcgtttccacctccagcacgccgcggtcggtaaagaaacggcgaatttccgccattacagccgcacgttttaacagatttggaatggatgcgctcggctgccaggttgccgtctcgctcatggtacttttctccgatttcatacaagggcacgaagtctactcgcaaccgtcgagtgaaacaaattttgtgcaatccggcggcgatattacatcctgataatttattgctaacttaattgcataaataaaattgataaattagcgcacggattgataaaaaaatcgaacgcgtcaattttccccaccatccctatggctatactcatttacctataaaggagcagtgatactttttcgccagcccggcggcgaaatacacaaaaactggaggaatgtcgtgcaaacttttcaagccgatcttgtcgtcattggcgcaggcggagctggtcttcgcgcagccatcgccgctgcgcaggctaatccaaaagccaaaatcgcactgatttcaaaagtctatccaatgcgtagccataccgtcgccgccgaaggcggttctgcggcggtcgcgcaggatcacgatagctttgaataccattttcacgacaccgtcgccggcggcgactggctctgtgaacaggatgttgtagactatttcgtacaccactgcccacggaaatgacccaacttgagctgtggggctgcccgtggagccgccgcccggacggtagcgtcaacgttcgccgcttcggcgggatgaaaatcgaacgtacatggttcgccgctgataaaaccggcttccatatgctgcacactctcttccagacctccctccagttcccgcaaattcaacgtttcgacgagcacttcgtgctggatattctcgtcgatgacggccaggcccgcggcctggtggcaatgaatatgatggaaggcacgctggtgcaaattcgcgccaatgcggtcgtcatggctaccggcggcgctggccgcgtctatcgctataacaccaacggcggcatcgtaaccggcgatggcatgggcatggcgctgggccacggcgtcccgctgcgcgacatggagttcgtccagtatcacccaaccggcctgccgggctcggggatcctgatgaccgaaggttgccgcggcgaaggcggtattctggttaataaaaacggctatcgctacctgcaggattacggtatggggccggaaacgccgctcggcgagccgaaaaacaaatacatggaactcggcccgcgcgataaagtctctcaggccttctggcacgagtggcgcaaaggcaacaccattccgacgccgcgcggcgacgtggtttatctcgacctgcgccatcttggcgagaagaaactgcttgaacgcctaccgttcatctgcgaactggcgaaagcctatgtcggcgtcgatccggtgaaagagcccattccggtgcgcccgaccgcccactacaccatgggggtatcgagaccgaccagcagtgcgaaacccgcattaagggcctgttcgccgtcggcgaatgctcctccgtcggcctgcacggcgccaaccgtctgggatccaactcgctcgccgagctggtggtctttggccgccttgccggtgagcaagctatgcagcgcgcaatggccacgggagaagccaacaacgcggcgctggatgcgcaggtcaacgacgttgaaaaccgtctgaaagacctcgtcaatcaacaaggcaatgaaaactgggccaaaatacgcgacgaaatgggtatgtcgatggaagaaggctgcggtatttatcgcacgccggagctgatgcaaaaaaccatcgataagctggccgagctgcaggagcgctttaagcgcgtgcgtatcaccgacacctccagcgtgttcaataccgacctgctctacaccattgagctgggccatggtctcaacgtcgccgaatgtatggcgcactccgctatcgcgcgtaaagagtcccgcggcgcccatcagcgtctcgatgaaggctgcactgaacgcgacgacgtcaatttcctcaagcataccctcgctttccgtgaggctgacggcagcacgcgcctggagtatggcgatgtgaagattaccactctgccgccggctaaacgcgtgtatggcgccgaagcggaagccgctgagaagaaggagacgacccatggctgagatgaacaaactgaaaattgaagtggtgcgctacaatccggaagtcgacaccgcgccgcacagcgccttctatgaagtcccttacgacgaacaaacctcgctgctcgacgcgctgggttatatcaaagataacctcgcgccggacttaagctaccgctggtcgtgccgcatggcgatctgcggctcctgcggcatgatggtcaacaaggtgccaaaacttgcctgtaaaaccttcctgcgcgattacagcaagggtctgaaggttgaagcgctggctaatttcccgattgagcgcgatctggtggtcgatatgacccactttatcgaaagtctggaagcgattaaaccgtacatcatcggtaatgcgcgcacgccggatcaggggccaaataaacagaccccggcgcagatggcgaaataccatcaattctccggctgcatcaactgcggtctgtgctatgccgcctgtccgcagtttggtctgaacccggagttcattggcccggcggcgatcaccctcgcccatcgctacaacgaagacagccgtgaccacggcaaaaaggaacgtatggcgcagctcaatggccagaacggcgtgtggagctgtactttcgtcggcttctgctccgaagtttgtccgaagcatgtcgatccggcggccgccattcagcagggcaaggtagaaagttcgaaagacttcctgatcgccaccctgaaaccacgctaaggagtgcactatgacgactaaacgcaaaccctacgtgcggcccatgacctccacctggtggaagaagctgccgttttatcgcttctatatgctgcgtgaagggacggcggtgccgacggtctggttcagcatcgtgctgatttacggcttgttcgccctcaagcacggcgccgaaagctgggagagttatgtggccttcctgcaaaacccgattgtggtgatcctcaacctgatcaccctggcagcggcgctgctgcacaccaaaacctggtttgagctggcgccgaaagccgccaacatcattattaaaggcgagaaaatggggcctgagccgctgattaaagggctgtgggcgataacggcggtggtcagcatcgtcatcctgtttgtcgcgttgttctggtaaggaggctgatatgattaatcccaatccaaaacgttccgatgaaccggtgttctggggctgtttggcgctggcggtatgtggggggcgattatcgcgccggtgatggtgctgctggtcggcatattgctgccgctggggctcgctcctggcgatgctttcagctacgaacgcgtctacgccttcgcccatagcttcatcggtcgccttttcatctttctgatgattgttctgccgctgtggtgcggcctgcaccgcatccaccatgcgatgcatgacctgaaaatccacgtgccgaacggcaaatgggtcttctatggcctggcggcgattttaaccgtcgtcaccctggtcggcgtgttatttatctgaggcaacatctcgcccggtagcaatctgttaccgggctcgcttatcgacaaaatcgccctacttttttcctgccgctatctacacttagagaaaaagcggtaaggaatatacctatgcgtctgctgccagtgttaaccgtggttatcgcgtcattgctgagcgttgcgtgcagcaatcccgttcctcccgctggcgtgaccgtcgtcagcccatttgaaagccaacgcttcctcggcacctggtatgaaatagcccgcttcgatcatcatttcgaaagagggctggaaaaggtcaccgcgacttacagtctgcgcggcgatggcggcattgatgtggttaataaaggttataaccccgagcgtgggatctggcagaaaacagacggcgttgcctggttcaccggcgatcccaaccgcgcggcgctgaaagtctctttcttcggccccttctatggcggctacaacgtgattgcgctggataaagagtaccgccatgcgctggtttgtgggccggatcgcgattacctgtggctactggcgcgcacgccgaagatttcgccgcaggtgaaacagcagatgctggatatcgccacccgacagggcttcgacgtaagcaaactgatttgggttaatcagcgctattaatgcgcgctcattttcagcccgataatgccgatcacaatacaggccaggctcgcgatacgcatcgggcttgcggattcccccagcagcacgatgccggtaatcgctgcgccaacggcgccgatcccggtccacaccgcataggcggtacccaccggcaatgatttcatcgcccacgatagcagcgccatactgacgaccatagcagcaatggtaatcacgcttggcagcagacgactaaatccatgggtatatttgaggccgacggcccacacaacttccagcaaaccggcgataaagagaatgatccaggacataaggctccagtaatggggccgtccccgaatgagatacgctcacgggtcgtcccgcaaggtggttgaaaacgtcgggattataagcaacagcgccgtgaatgtgaagaccggtacggcgcaaggccgtaccggtaatgtttaattctgagctttggtcgccgcaccagagatagcgctgccgccgtcagaaatgtcttcaccgataccacgcgtggtattacatgcggtgagcacagaagaaaggaccaaaacagtaaagaacgccgcaatcgtttttttcaccataatatcatccttataaacagtttttgttttcttgccctataagcatagccaaactgattcagaatgaagggatagtcgcgttttttaagagaaaaagaggttcaggctgaacttcgcaagatgaattcagaggatgagaatgacttaatgaaatgagattaactcacggcgtgagaaatcgcgtgccctaacccctggatatcttcgccaaaaccgcgggcggtattgcatccagtaagcagcacaccgctgagcagcagcaaggcaagaagtttgagcatctggttcatgttagttctggcgctaaactgaaggcgcagcaacaaggctgcgcccaccgtctcaaagcatgaattacttcacgcgagatacgtattcgccggagcgggtatctactttgatgacttcgccaatctgaacgaacagcggaactttaaccacagcgccagtagacagagtcgccggcttgccgccagtacctgcggtatcgcctttcagacccggatcggtttcaacgatttccagttcaacgaagttcggcggcgtgactgcgataggctgaccgttccacagggtcacgatgcactcagcctgatccagcagccatttagcgttgtcgccgatagctttcgcatcagcggacagctgttcgaaggtttcgttgttcatgaagtgccagaactcaccatcgttgtacaggtaagtcaggttcatatcgacaacgtccgcgccttctgcagagtcggtggacttgaaggttttctcaacacgggtgccggtcagcaggcggcgcagcttaacgcgagcgaatgcctgacctttacctggtttaacgaattcgctggcttcaaccgcatacggttcgccatccatcatgattttaagaccagcacgaaaatcgttgctatagtaagtcgccataaggccctctgaaattgtttaacttggtagctaagccacaaaatggcgcatattgtaaccctaaataccccatccagagaagattggatcacgcaacttgccgatgttgtgaccagtcccgatgaactattgcatcttttagatctggaaacagatgcaaacctattggcgggacgcgatgcgaagcgtctcttcgcgctgcgcgtaccgcgcgcatttatcgcgcgtatggaaaaaggtaacccaaacgatcctcttcttcgtcaggtacttaccgcacaagaagagtttgttgccgccccaggtttctccaccgatccgctggaagaacaacacagcgttgtaccaggcctactgcataaatatagcaaccgggcgctattgctggtgaaaggcggttgtgcggtcaactgccgctactgcttccgccgccacttcccttatgccgagaaccagggcaataaacgcaactggcaggcggcgctcgagtacatagccgccaatccgcagcttgatgaaattattttttccggcggcgatccgctcatggccaaagaccatgagcttgactggttgctgacggaactggaagcaatcccgcatattaaacggttacgcatccatagccgcttgccgattgtcattccggcacggatcaccgaagggctggcagcccgatttagcgcctcctcgctgcagatactgttggtcaaccatattaatcatgccaacgagatcggcccggaattccgggcagcgatggcgctgctacggcaagcgcgcgtgacattgctcaaccaaagtgttctgttgcgcggtgttaacgataacgcacaaaccctggcggacctcagcaatgcgctgttcgacgccgggtgatgccctactacctgcacgtgcttgataaagtccagggcgcagcccacttcatggtagaagatgaggaagcccgggcgatcatgcgtgagctattaacactggtatcaggttacatggtgccaaggctggcacgcgaaatcggtggcgaaccgagtaaaacaccgctggatttaggtttgaagcaacaaccctaagtccatctctgccggccctgtccggcagatacttgaaaagcatattttccagataaatataccactagttttccagccttcgcctgaatacagtgctttcatgagatttataattatatattaagtacaatttaaacgatgtagtaataatgtttctaatataataacgaaaggatattagtaacagccataattacgaacataagaataaaccacatgggtaatttaaatgctctatctcttttgttttcaatataattttggcgttcattgttatttatctctggcacgctatcttctattgtcacaaccttttttattaagggggttatctggcaggtagacacttcttcctcagctttgacaaccggcacgatcgaggaaccagttgcaagaataaacccacgctgcctgacagtaacaatgatatcctgtgataatccagccttcagcagtgattttcttagcaatgatatgttttgataaaaagtattttgcgcgacgacgactccccttgttttccagacggattccagaaattcttctcgagaaatgattcgtccattactttcaattaacaattgtagacaacgtgcagttggaccattcaagttaatgctttcaccatttccattaacaggtcgtaactcactcatattcacatcgaatatgacttcattattaataatgaactcgctaaatgccataatgcttttccttttattcattagtcacgtgaattaaacatgaagttaatgagattccatttttgaacttgagcaaatagccctaaacagccctgccgttagatagtttcacatctcaatcattggctctccattttcgaacggcgcgaaggccaacgtgaccttttaacgaaaaggaagccaagtatattgtcgaacattcatcacgttaacgcaactactattcaagtagattaaaatgtgaaacgttcctcccatcattaaaataggttattcaattaaaattcacatgcattttacctgcttgccaattaaattcctcactgctcccgtcttaagctaattgcgggcaagtatctgcatattacaagggacaccaaaggagtaaagaacgggatagtgttaagactcagcggcaattaagggttattcagtgatccgttaattaaaactgaggcaacatctatttcagggattacgtatttatacatggacaaataaatgaaaaaaacaatcgtagctgtaatggttgctgcatctgcagttctgagcgcacaggcaatggccgctaacactgctgaagtgaccgttcttggcgaagtcaacgactcttccacttcttgcgtagtcactccgactggtactctgaacaatggcatcgttcgtctgacttctgttaccaccagcgaagcgaacgcacagactgctaacactctgttcaaaagccagaagtttggttttgacgtttctgattgcgccaagggcagcgataaaccagcaaccggcctgaccgttgcagttactggtaccactagcaccaacgcaacaattctggacaacaccgctgacgacggcgctgccggcatcggtatcggcatcgcgaaagccagcgacggttctcgtgtagccttcgatggttcccaaaccatggatgaaacctacactgacggcgaagtcacttctctgaactactacgctggttatgtgaaagtaaacgacgcgactactgtaaccgaaggtccggttaaaggcgtagcgacctttactatcgactacaccagcgccgacgcctaattttaccccgaagggctcgctgtccggcgagcccttttttcgtttagagaaccgctatgctcaggactttatttaaacttgtcttcccctgctttttactgataagcggcattgcacatgccggcattgtcattgaatctacccgttatctttacaaagagggttcccgcgaaataaccgcacaaatagaaaacaaagacggtattccctatttaattaagtcctgggtcgagaccccgaaaggacaaacgccgtccttcatggccacgccgccactgttccgtctggaagcgaaacagcaaaataccgtacgcctgttttcaacgggtaatgtcgctgtgccaactgatcgcgaatcgatgttttattttaacgttatggctataccacccgcagatgaggcaaatgccaaaaacaataccattcaactggcggttcgccatcgtatgcgtctggtgtatcgaccaaaatcgctatttgatatgaaaccaaacaccgaagcggcaaaactcgagtggcgaaagtcgggtaataaattatccattaaaaatcctacgccatttttctactacttcaatacgataaaaatcggtaataccgagataaaaaatgaagtgaatgctattcctccgatggctacaaaagaagtgacattaaaagaaagtgttaacgcatcaagtattacatggaagatagtcaacgattatggtggagccggttcgctctattcctcaccgctgtaattggaagttcttgttaatattatagggatgtgtttatgcaaaataaaaataaagacctattcaaactatcagcgctcggcatcgcattattgcccgcgcttttttgtggtttggataagaatgcgcaagcacgagattttttcgatccctcattcataaattcattgaatggtagcgatccttcaaacgccccagacttatctgtatttgaagccaggaatgcgcaggcacccggtgattaccgggtggatatcgtctttaatggtcaatacctcgatacccaaactataaaatttgtgattgataatagccgtgaaagtcttgcgagtgatgagattaaactagcaccctgtttcagtctgaaagacttatcgcaatatggcgtaagaatcaaagcatttccggccttgaaagaagatgctaatggctgcactaacctcacgattattccggataccaaagcggattttgattttaacgcccagcgtttaaatgtctccattcctcaggcggcattatccactgtcgtgcagggatttattcccgaggatcaatttgatgacggtatcaacgcgctactggtaaattaccagttcagcggttcggatgatttcgaaaccgaagatgaatactacagtcttaaccttcagtccggcttaaaccttggcccctggcgcatacgaaacctgagtacatggaacaaaagtaaaggtgatagcggcgactgggagtcggcatacctgtacatgcagcgcagcatacgccctattaatagtaacctggtaatgggtgaaagctcctcgctttccgggatctttgacagcgtaccatttactgggctccaactcgcgacggatacctccatgctgccggagagccttcgcggctatgcgccaattatccgaggaattgcaaaaaccaatgccagggtgatcgttaagcagaatggctaccaggtatatcagacctacgtagccccggcgcctttgaaatcaccgatatgtacccaagcggcggtagcggcgacctgtatgtaacagtagaagagtcggatggctcaaaacaagaatttatcgtgccgttcgccacgctgccggtcatggtacgtgaaggccagctacaatatgaaatcacttcaggtaaatatcgcccatatgatgacggcgtccatgaaacgccatttacccaggcaacggccagctatggggtatccagtagcctgacggcctacggcgggatgcaaatggcctcacattatcaggcattgtcatccggtctcggctataaccttggtgatttcggcgccgcgtcagcggatgtcacccaggcctggtcaaaaatgcaggatcgggaaaagacttcgggacagtcctggcgcatccgctacggtaaaaacatccttgataccggaaccaacattaccatcgctggctaccggtactctactgagggatttaacaccttatccgaggtgctggatagctatgctaatgacggtagctataccacccgttcattacgcaatcgaaccaacctgacactcaaccaaagcctgggtaaaggacttggtagcgtatctattagcgggctggttgaggattattgggatgataaacgcaccaataaatctatcagcgtcggttataacggtggctttagaaatgtgaacttctatctgggctatagctatagccgctatacctggagtaacaatagctccgacagcgacgcgcaggacgatcagcgcattacgctgaccgtcacgctgccaatcagcaactggcttcctggtacctacaccagctatcagctcaccaatagtaaccctggctcaacggatcagtccgtcgccatcggaggggttgggctggaaaacgatagcctcgactggagtattcagcagggatatagcaaccgtgaatattacagcggcgacatgcgtgcgacctataacagctcccagggcagccttaacgccggttacagctatgaccgcgatagccagcgtgtcgattatggcgccagcggcagtatcatcgcccatgctgatggcatcactttaggtcaggatatcaccgatgccgccgtgctggttaaagctccggggctggatgacgtcaaactgacgaccgataacaccatctcgaccgactatcgcggctatgccatcgtaccttacgttaccccatatcgccgcaccgatattacccttgatagcgccacgctcggtgatgatatggaattgccggaaaccacgcaaagcgtagtacctacccgcggcgccatcgtccgagccaactacgaaggcaagataggacagcgcgcctttattcacctgaaaactgccagcggcaatgatgttccttatggcgctatggtcctactggcgggggatgcgaaaagccaggccagcatcgtgagtgatgccgggatggtctatatgtccgggttgcagcaaaccgggacgctcaacgtgcagtggggaaaaagtacttcccagcagtgtaatgcccccttcacgttaccgccacgggaaggcaaaaccgctggcttaagccaggtcgaaacggtgtgtcgctagccattatttaaggacgaatattgatgaagagaatgtttattctattaatgcttttagttacctgtggtgaggcggctgcaaaatgtagttactcaggcagcatccagcggcaagcatttactatcagcgctaaaattccaacagatgattctattccggtgggaagcatattgtattcaactaaatacggtaccggcacctataaaaatttctcatgtagccagaaaacaaacgatcagtatattactactattagtacgccggaggtttctggtgtaaccggaattcagggaatgccggtatatgaaaccggtattgatggtattggattccaggtatccgatcttctggaaagtaaaaatggcgcattggtccctgccgtggcgggttcagtactgataccgtttgagaatacgtcagataattactataaattcatcaccgtgtggtttatcaaaaccaagcaggtcattgatacttcaggttcggactcaaacccatcaatcaccttttctgtcggtaatccgaccactaaccctggcaccaccgaaaaactcttatacacgactagcattaagctcaaaagcactaaatatcaggcaacctcctgtgatatctcaccatccagttcacagataacgctaaaccggattaagaaaagtacgttaatgtcggtctctcgcggcggcgtcaccccggagcagaaaaatattctattaacgattacctgccctgcgggtcaattggtaatacactgatgtattggtttaacccggtaggtacagcaagtacatctggtaatggtatcattaataatatgataaccgatgattctggtgccaaaaacgttggcatcattttcaagcaaaccggaaccccattagtcttttatgatatggatagctacagctttaatagcgccgccacgtcacaggttatcaaccttaccgctgattattatcgccagagtaatagcagtgatagcatcacaaacggtaaagttaaggctatgttagaagtagtgatccaggaacagtagaaatactgaatgtaacaagagagccagtaatggctctctttcattctctttgtatacaaaaggattgcggtacttttgcatataaataaattcaccaatacaatatgaatgccagaataattatgaattatataatatgaaagcacttcataaattattcacacttcatttcgttgcttacactcattttcacctctattgtttgccaccgggcgattacatcgaccagtagtttagtcaacgtttacttaagggaattagagtaatgaaagaattaacagtttttgaaatggaagcaatctccggtggatatacgtgggatttttcctccgcttcagcagcgttcacttctctggctagtaatgcagtagaagcgctcggtgctggtatcctcggctctgtcattacggcctgtgtcggagcgggacttggtggctttcagggtggttctaacggtggcatcctcgggctgggtctaattggcaatgccgttggcgctgtcgcaggctttatcttaggtgctatcggcggagccgcaggcgctgtcgcattaggttgggaaggttccgttgaggctctgcaatcactgattgagagcacgcttaacggcactttcgctccgtggtaaaaatgatgaaataataacaaaggccttttaggcctttgttgctctatattcaatgtcagccagaaccagtaaaatactattaacatgaataataagctatatcgcaaggaagcgatcgaatacaaaaggcatcactggaaagggaaagctttgttgctcgctggcttacccgcatggttaattgccttattgtcggcattatttctcattgcgcttatttgcgcattgatattttgcaagtttacccagcgtgtcgatgttaaaggcgaagtcattaccctacctcactcaattaacgtctttgcgccacagcaggggtttatcgtcaagcaattcgtaaaaattggtgatgtcgttaaaaaaaaccaaccgctctacgaaattgatgtttcccgcagcaccaccagtggcaatgtcagcgcggcacagatagaagtcatcaatgaaaaaattgccaactctgaagatattattaaaaaactggaagataataaaaaccagacattaaatgcgctgaacacgcaattgaaaaccaccacagcctccctgaaggagaccaaccgtatgctggtcaatacccaggtaggcctgaagaaaatgcacgataacctttccagttatgataaatacctgagtaatgggctgataaccaaagatcaatataattatcaacattctctgtattttcagcagcagagcgcctatcagtctttggttagccaaaaaatgcaactggaatcgcaaatcacgcaacttaacagcgataagatcactaaagctgctgattttgacaaccaaatatccagccagtacaaccaatccaacgattttaaaaatcagttagtcgagtccaatgctaacggtaatattattatcaaatcgaccagcgatggcagaattgagtcactatcagctacccaggggcaaaccgttgataatggaagtagtctggcacagataaagcccactggaaatgttgagtattttcttatcctttggctaccaaacaacactatcccctatttaaaaacaggggacaccattaatattcgctatgatgcattcccatcagacaaattcgggcaattccctggaaagcttatatccatttcgtccatgcctgcatcacggcaagagatgtctgaatacactaacgtcagtaacggtgccaaccagcaacaagaactggcgctgtataaagctattgtgaaaatcaaagataagcagttcgaatatgacgggaaaaagctaagtctgtccaatgggcttaaagcacaggctgttgtcttccttgaagaacgccctctctatatgtggatgtttactccggtttataagattactcaaagcgtgagcggcccgattcatgactaatgaactgtttgaaaaaattacggcgaaagttaatttttcaattctgaaaaaaacgccggtaatactgcaatctgaagccgcagagtgcggcattgcctgtctggcaatggtttgcggccattatggtctcgatattgatctgttcaatttccgtcagcgctttggtagcccatctcaaggggtcacgctgatgtcattaagcaaaacagcagagcatgcgggcttaaaaagccgggcgctgtcgcttgaccttgatgaaatcagacaattaaagctgccctgtgttatccactggggaatgaaccactatgtcgttttgaccaaagtgcgtaaatccagctttatcgttcacgatccggcgctgggtaaacgcattatcggcatccaggaaatgtcgaataattttaccggcatcgcgttagagctatggcccgatcaaaacttccagcaggaaaaagccaaatcccgcttacgtctgctggatctgatgcgcaatatcgtcggattaaaatcagcgctgttgaaaattttcgcattttccgtcgtcgttgaagccattggtttactgctgcccatcggcacgcagctggtcactgaccatgtgatcatggcccacgatcaaagcctgctctcggttatctgtattggtctggtcttctttacgctgttccgcacctttatcagtatgctgcgcgcatggacttcactgacgctcaacacgctgaccaatattcagtggaaaaccactcttttcgatcatttggccagcctgccgctggcattttttgaaaagcgtcatctgggagatatacagtcccgcttttcatcgctggacaccattcgctccacgttcactaatagcattgtcagcggcattatcgactcgatcatgacgatcggcctgctgattatgctcaccctgtacggcggttggctaacatgggtcgtcgttggctttaccttatgttacgcccttatgcgtctgggaacttatcgcttctatcgccgcgttgctgaagaacaggtaatcaaaggcgcgcgctccagttcacactttatggagtcgctatacggtatttcgaccatcaaagcgctgaacctgaaagaacgccgctcccagcactggctgaatatcaacatcgacgcctgtaatgcagggatcaaacagacccgtttcgacatgatgtttagcggtatcaatacctttattaccgctatcgatcaggtggcggtactgtggctgggcgccattatggtcattgataatgaaatgaccctcggtatgtttatggcctttaacgcctaccgcggtcagttctcccagcgcgcatccagcctggttgatctgaccatgcagctgcgcatgttatcgctgcacaacgagcgtctctccgaaatcgtcttcagcgaacctgagcaagaattaccatcacgggacgtcttctcaaaagatgccggcgcaagacttgaagtcaaaaatctctgctatcagtacgatcccttctcgcagccgattttctcaaatctgaacatcaccgttgagccgggggaatccgtcgcgctggtcggcccgtccggcgtcggtaagaccacgctattgaaagtgatgtgcgggctgctctcgcccaccagcggcgacgtcttcgccgataatctcgatatccagaagataggtctaaataactatcgccagggaaccgcctgcgtgctgcaggaggaccgcctcttttccgggtcgcttatcgataatatcagcggttttgaagataacgccgatctggattttgtcgtcgaatgcgccaaacgctgcaacattcacgacgaaattatgaaaatgccgatgggctatgaaaccatcgttggtgagttgggcctggggatttccgggggccaaaagcaacgtattttgattgcccgcgcgctttatcgcaaaccgagcattctgtttatggatgaggccaccagccatcttgatttaagaaatgagtcggttattaaccagtctatttcaggcctcagtattacccgcgtcatcgttgcccaccgcccgtcaactatcgcctcagccgatcgggttattgatttatcacaatcaaaaataccaatgccagcgtaaggagaagaatatgcaaggaacgtttattggttttaacaccgccggaattacctatgaagaccatttcatggcgctgctgctgaaagtaaaacatcagaatggcatgtttcagacgtattatttgcaggcgccggtgctggctgacctgctcatggtcctggcaaaccggatgtctattttcttgcagagattacagcaggatggcgagaatgaggctcagaaagtggagcttcttgcctacaatgaaacgctaatagccaacacgccagagatagatatgttggaggtacaaaaccccaacccggagctgcgaatcatgtcgatcaccctgaaaccaggggaaacagaatcgacgctgatattaatgctgcagaacgagcaaatagcaactctacggattgatgaccgccaggtcgaagcgatgattttggggatccaacaatctctcaccatggccgcggacacgaaactgaatgaatatttagctttggctctggacttcgtactgctgtacaccgtcgatttaacgacccaacctaatatcgagtaccagcaatacgctcaggaagaatggaagttgaatctgttcaaccatcatcttggcgtactgtatagctacgagcaggaagacggtaagaaggtgctatctggtgcggtgataaaaaccagtgttgaacatcagtcagaattcgagaaaagcattgcgctacgtctgattgcaaaaagccaaaaactgaagcaactccacgaccagcacacaccgtatcagatttttagtaaggtgattccgtccgcaccgggacaaatgctgactaaggatgaatgcttaaagtcattgcacgaattctacgtggctaccaaagctgcgcttgatgcataaattgttaagcactctctgcacaggcagagagtgcttaacacatcagttcgggcacttataaacctggccgttcatctggctatcggtcgggacaaagctggacagcaggttctgcgtcgggctgctcacgccataaattacgttaccgcccatggccgcagcctggttacgcagggcattcgccgcgccgcgcatagaaccgccttcatcgccattctggcctgatagccagttgctttgcgtaccggtagccgtgcctaacagctggcattccgttcccggtttatcttcaacaaaacgcacgctctggccgcctgcggttaattcgttgctggaactgcaacccgctaacaataatgctgcgccgacaatccctgctaaatattttacctgcatgttattccccaatgagctggacgcactggcccggatgtaaaccttatactaaaaagccagcaaaaagaaaaacccccagccatttctgaccggggtttctgcatttttatgccgtatagcgcacgattacatcatgccgcccataccgcccatgccgcccataccgccagcagcacctaagtcaggcgcgtcgcctttcggcaggtcggtcaccatgcactcggtggtgatcatcagaccagcaacggatgccgcgtactgcagcgcagaacgggtgactttagttgggtccaggataccgaagtcgatcatgttgccgtactcttcggttgccgcgttgtaaccgtagttaccgtcgccagctttcacgttgttagcaacaacagacggctcttcgccggcgttggaaacgatctgacgcagcggcgcttccattgcgcgcagcgcaactttgataccgacgttctgatcttcgttctgaccggtcaggccagcgattttcgccgcaacgcgaaccagcgctacgccgccgcctgctaccacgccttcttcaaccgcagcacgggtcgcgtgcagggcatcatcaacgcgcgcttttttctctttcatttcaacttcggtagcagcaccgactttgattaccgcaacgccgccggccagtttagccacgcgctcctgcagtttttcacggtcgtaatcagaggtcgcttcttcgatctgcttacggatctgagcaacacggccctgaatcgccgcttcttcgccaacgccatcgataatggtggtggtgtctttgttgataacaacgcgtttcgcctgacccaggtcttccagagtcgctttttccagctccataccgatctcttcagagataacggtaccgccagtcagggtcgcgatgtcctgcagcatagctttacgacggtcgccgaagcccggcgctttaaccgcagcaactttcacgatgccgcgcatggtgttaacaaccagagtcgccagcgcttcgccttcaacgtcttcagcgatgataaccagcggtttgccggctttcgctacggcttccagaaccggcagcatttcgcggatgttggagattttcttgtcagccagcaggatgaacgggctttccagttcaacagcgccggtgtccggcttgttgatgaagtaaggagacaggtagccacggtcgaactgcataccttcaaccacgtccagttcgtcttccagaccggtaccatcttcaacggtgataacgccttctttaccgactttatccatcgcttcagcgatcagtttacctacggtttcgtcggagttagcggagatagtaccaacctgagcaatcgctttagagtcagagcacggtacggacagcgctttcagttcttcaacagcggcaacgacagctttgtcgataccacgtttcagatccatcgggttcatgcccgcagcaacggctttcagaccttcgttaacgatagcctgagccagtacggttgcggtggtggtaccgtcgcctgcagcatcgttcgctttagaggcaacttctttcaccatctgcgcgcccatgttttcgaatttgtcttccagttcgatttcacgagcaacggaaacgccatctttagtgatagtcggcgcgccgaaggatttgtccagaacaacgttacggcctttcgggcccagggtgactttaactgcatctgccagtacgtttacgccgcgcagcatttttacacgagcgtcgttaccgaattttacgtcttttgctgccatttcttttattcctcaaattcgttcagggtcgtgcgaattacgcttcaacaattgccaggatgtcgctttcggacatgatcagcacttcttcgttgtcgatcttctcagacttcacgccgtaaccatcgttgaaaatcacgatgtcaccaactttaacgtccagcggctgcacagttccgttttccaggatgcggcctttaccgacagcgatgatttcgccacgagttgatttagctgccgcagaaccggtcagaacgatgccgcctgcagatttggtttcaacttctttacgtttgacgatcacacgatcatgtaacggacgaatactcattgatagctctccttcgagaaagtcattatcagttatggatggcgccgggccgtaaacggtttccgactagtgcagagagagatggggatggccgtttacggcttcaaggggaaaattaaaaaaaaatttccgcctgtgcgctgacgcgcaaaaatattcccgtggcggctgcgctttctggtgcaaggggttgtgataacatcgtttttttgccgcgcgcagggttaagtcatgagtggtttaaaacaggagctggggttaggtcagggagtcgggttactttcaacatcactactgggaaccggcgtgttcgccgtaccagcgctggcggcgctggtcgctggcgataacagcctgtgggcgtggccggcgctgattctcctggtctttcccatcgctattgtgtttgccgtgcttgggcgccactttcccagcgctggcggcgtggctcattttgtggatatggcgttcggcccgcgtctggcgcgggtaaccggttggctgtttttatcagtgatcccggtgggcttacccgccgccctgcatatcgccaccggttttggccaggcgctgttcggctggcacgatactcagctgctgcttgccgaactcggcacgctggcgatcgtctggtgggtaggctcgcgcggcgccagttccagcgccaatctacagacgctggtcgcggtaatgattgtcgcgctgatcgtcgccatctggtggcgcggcggcataaacccggcgcagatccctttcccggaacctaaagatgtcgacacgtcgcagctgtttgctgccctatcggtaatgttctggtgcttcgtcggccttgaagcctttgctcatctggcgtcagaatttaaacgtccggagcgcgacttcccccgagcgctgatgattggcctggtgctggcaggaaccgtttattggggctgtaccgtggtggtactgcattttcgcgccttcggtgcggaaatggcggcagcggcctcgctgccaaacatcgtggtacggctgttcggcgtgcaggcgctgtgggtcgcctgcgtgatcggctatctcgcctgcttcgccagcctcaatatctatatccaaagtttttcccgactggtctggtcgcaggcgcagttcaagccagagagttatctggcccgcctgtcgccgcgtcaggtaccgcgcaatgccctgaatgcggttttaggctgctgcgtactcagtacgctgtgcatttacgggctgaacattaatctcgatgcgttgatcgtctatgccaacggtattttcatcatgatctatctgctgtgcatgctggcgggatgccgactcctgcacggtaaataccgcctgctggccatcgtgggaagcgtgctttgcattttgctattggcaatggtcggctggaagagcttgtacgccgttattatgctggcggtgctgtggttcgccttacctgcacggtcatccttagcaagcagataacaaaaaaccggcacaggccggttttgtcgttttagcggtcgtctttgtgatccagacggtcgcgttcgtcgtctttgcgctggaactccccttcgaaggtgtctccgttgccggcgccggcgctaaaaccgccgcccggcatccggctaaagcgcagatacggcattagttttaaagtcatcagcttttgcaccggcggcaacagcagcagcaggccgaggaagtcggtaaagaagcccgggatcagcagcagaagcccggcgataatcagcgacacgcttttaatcatttctgcggcagggctttcgccagccgccattttctgctgcatcagcatcaggtttttgaagccctggttgcgcaccagcgacatccccaccaccgagctaaagataaccaggatcagcgtcagcagcacgccaagcacgtgcgcgacctggataaagatcgagatctcgacgtatacatataagaaaaaggcaataaatgggatccaacgcaccggcgtctccttcattcggccgtcgtagtagacgcccgtagtgataaatttgctattcgcgttatagggatgtggggttggcgcgccatttttcaatcaacgacaacggcatttttttcaaaaatagtaaagcggtgactcatttcacagattaataattcttatccgccgcgctatataataagtgatcaaggttactgaacttcgctatcatcagcatatgatcgtgggcaccgggccggttaaggaaataatcttcggtctgaaaatacgctaaatcctataaattctgtgtatttggtgaattcattggcagcttgaaaaagaaggttcacatgttaaacaacattcgtatcgaagaagatctgttgggcaccagggaagttccagctgacgcatactatggcgttcatactctgagagcgattgaaaacttctacatcagcaacaacaagattagcgacatccctgagtttgttcggggcatggtgatggtgaagaaggccgccgcgctggctaacaaggaactgcaaaccattcctaaaagcgtagcgaacaccattgtcgccgcatgcgatgaagtgctgaacaacggtaaatgcatggaccagttcccggttgatgtgttccagggcggcgcgggcacctccgtcaacatgaacaccaacgaagtgctggcgaatatcggtctggaactgatgggccaccagaaaggtgaataccagttcctcaaccctaatgaccacgtcaataaatgccagtccactaacgacgcataccccaccggtttccgcatcgcggtctatgcttcgattctcaaattaatcgatgccatcaaacagctgggcgaaggcttccaggcgaaagccgtcgagttccaggacatcctgaaaatgggccgcacgcagttacaggatgcggtgccgatgaccctcggtcaggaattccacgcttttaacgttctgctgaacgaagaaaccaaaagcattctgcgtaccgcagaactgctgctggaagtgaacctcggcgcgaccgctatcgggactcgcctgaatacccctgacggctaccagcagttggcagtacagaaactggcggaagtcagcaacctgccggtcgttccggcggaagacctgattgaagcgacttctgactgcggcgcgtatgtgatggttcacagttcgctgaaacgcctggcggtcaaactgtccaagatttgtaacgacctgcgcctgctctcttccggcccgcgcgctggcctcaacgaaatcaacctgccagagctgcaggccggttcctcaatcatgccggcaaaagttaacccggtggtgccggaagtggttaaccaggtgtgcttcaaagttatcggcaacgataccaccgtgaccatggcctccgaagctggtcagctgcagctgaacgttatggagccggtgattggccaggcgatgtttgaatctatccacatcctgaccaacgcctgctacaacctgctggaaaaatgcgtgaacggcattaccgctaacaaagcggtatgcgaaagctacgtctacaactccatcggtatcgtgacctacctcaacccgttcatcggccaccacaatggcgatatcgtcggcaagatttgcgccgaaaccggtaagagcgtacgtgaagtggtactggagcgcgggctgctgaccgaagccgaactggatgacattttctccccgcaaaacctgatgcatccggcttataaagcaaaacggtataccgatgaaagcgaacagtaagctttcagggtaaactaaccaaaggcatgtcagtgatgacatgcctttttgcttttttgggtttacgaaacgacaacaattcaatatcaacttgttaaaaaacaaggaaggcatatatgtttggtgcagagctcgtggttgtcctgctggcaatctatttgggggcccgactcgggggcattggtatcggctttgccggtggcctcggcgtcctcgtcttaaccttaatttttcaaattccacccggggcgatcccctttgacgtcattgaaatcatcatggcggttatcgccgctatcgccgcgatgcaggtcgccggagggatggattatctggtcagcctcgccgaacgtatgctacgccgccatcccaagtacattacttttcttgcgccgctggtcacctggtttatgaccgtactggcaggcacaggtcataccgcgttctctaccctgccagtcattaccgaagtggcgaaagaacagggtattcgcccttcccgcccgctctccatcgccgttgtcgcttcgcagattgcgattaccgcctcgccgatctccgcggcagtggtcttctttgccggtattctcgaaccgcttggcgtcagctacctgacgctgctggcgatctgcctgccggttaccctgattgccgtcatgctgaccgccgtggtctgtaacttcctcggctgcgagctaaaagacgacccggtataccaggaacggctggcaaaaggggaagtgagcctgcgcggcagccaggtcttcgagctaaagccgcatgctaaacgctccgttctgctgttcctcgtcggcatcgtcgcggtcatgttctacgctaccgccatcagcgacaccgttggcctgatccagaacccggtgctgccgcgtaacgaagcgatcgtggtcttcatgctgaccatcgccacgctgattagcatcacctgtaagatcgataccggcgaagtgctgaacgccagcacctttaaatccgggatgagcgcctgcgtctgcgtgctcggcgtcgcctggctcggcgataccttcgtcaaagcgcacattgccgatatccagacggtagcgggcgatctgttgcaaaactatccgtggctgctggcggtagtgctgttcttcgccgctacgctgctctattcacaggccgccactaccaaggcgttgatgccagccgcgctgctgctcggtgtcaccccgctgacggcaattgcctcattcgccgcggtctcagcgctgttcgtgctgccaacctatccgaccctgctggccgcggtcgaaatggacgacaccggctccacgcgtatcggcaaatatgtctttaaccacgccttcctgatcccgggcgtcatcgccattacgctttgcgtgatccttggattcatcttcggcggcctcatgctgtaagatcgttaaaaaggggccagtaaagtaactggcccctttggttaatctccccgcatcatgcatgctatagtgcctcttttcgctgatacgaggttcacgatgactacgcctgatgctgttgttgtactctgtaccgcgccggatgaagcaaccgcccaggatctggcggccaaagcgctcggggaaaaactcgccgcctgcgccaccatcctgccgggagcgacgtcgctctactactgggaaggaaagcttgagcaggagtatgaagtccagatgctgctcaaaaccaatcaggcccatcagcaggcgttactggactgcctgaagtcccatcacccgtatcaaacccccgaactactggtcctgccggttactcacggagacaacgattacctctcatggctcaacgcatcattacgctgatcctgctactgtgcagcgcatccgccagcgccgggttgtttgacgcccccgggcgttcaaacttcgtgccggccgatcgggctttcgcctttgactttcagcagaatcaacacgacctcaacctgagctggcgcattaaggatggctactacctctaccgtaagcaggttacgctgacgacaaaggacgcggcgatcgtcgaaccttctctaccgcctggcgaatggcatgaagacgagttttatggcaaaagcgaaatttatcgtcagcgcctgatgttgccgattaccctcacgcaagccggcaaagcagccacgctgaccgtcacctatcagggctgcgccgacgccgggttctgctatccgccggagaccaaagtcgtgccgctcagcccggtgctcgccgattccgacaaggcgcaagcggccaaaccttcagcgcccgccacgctcccggccagcggcagccagaccggcgcggaacccgcgtcgctgccattttcggcgctatgggcgctgctgattggtatcggcatcgcctttacgccttgtgttttaccgatgtatccgctgatttccgggattgtcctcggcggtaaacagcgcttatcgacggctcgagccctgctgctggcctttatttatgtccaggggatggcggttacctataccgcgctgggactggtcgtggctgccgccggtctgcaattccaggccgcgctgcagcacccttacgtattaattgggctgtcagtggtatttatcgcgctggcgctgtcgatgttcggcctgtttacgctgcagctgccttcatcactgcaaacccgactgacgctaatgagcaacaagcgccaaggtggttcgccaggcggcgtgtttgcaatgggcgctatcgccgggcttatctgttccccttgcactacggccccgcttagcgccattctgttgtatatcgctcaaagcggtaatctgtggctcggcggcggcacgctgtatctgtacgcgctgggaatggggctgccgctgatcctggtgactgtgttcggtaaccgtctgctaccaaagagcgggccgtggatggctcacgtcaagaccgcgtttggcttcgtgatcctcgcgctgccggtctttttactggaacgcgttatcggcgaagcctggggtttacgtctgtggtcgttgcttggcgtcgccttctttagctgggcgtttatcacctcgcttggcgccaccaggccctggctgcgtctcgtgcaaatcgctatgttaggcgccgcgctggttagcgcgcgtccgctgcaggattgggcctttggcgcaccggccgtccagcagcaggcgcatcttgaatttacccgcgtcagcaccgtggatgaactcaaccaggcgctggctcaggccaaagggaaaccggtcatgctcgatctgtatgccgactggtgcgtggcctgcaaagagttcgaaaaatatacctttagcgctcctgaagtgcgacaggccctaaaagagaccgttctgttgcaagtggacgtcactaagaacagcgcgcaagacgcggccctgctgaaacatttacaggtgctcggcttgccgacgattctgttcttcaacgcgcagggagaagaacagcccgcgcagcgcgtcaccgggtttatggatgccgcggcattcagcgcccatttgcgcgattggcaaccgtgaacgacacttgaggaggataaatggaggagactaccgtgcaacgtgaagatgtcctgggtgaagccatacaaattctcgaaatcgagggtatagccaacaccacgctggaaatggtcgccgaccgcgtcgcatatccgcttgatgacctcaagcgcttttggcctgaccgcgaagcgttgctctatgacgccctacgttatttaagccagcaggtagacgcctggcgtcgccagttgttgctggatgagacgctgagcgcagaacaaaagctgctggcgcgctatagcgcgctgactaaatgcgtcagcaaccaccgttatcccggctgcctgtttatcgccgcctgtaccttttatccggatgcccagcacccgattcatcaattagcggagcagcagaagcaggcttcgctggcctacactcacgagctgctaactcagcttgaggtggatgacccggaaatggtcgccaagcagatggaattaattgtcgaaggctgcctgagccgcatgctgatcaaacgcagccaggccgacgtcgataccgcccatcgtctggcggaagatatcctgcgctttgcccgctgccggatgggcggcgcgctcacgtaattcggatttcccaagcccagcaaggcgcatataattccctgacactttctgtggcagggatttctatgcgtccacttctctgggccgccgtattggggctctgttcgacctcgctgatggccgcccctcctcgcggtttctctttcgcctacaaagactgggaagtcgcctgcgataataccggcacctgccgggcggcgggttatggtgcgacaatgggcgaagtcagcatcctgctgacacgcagtgcaggcgcagggcggcaggcaactgcgcaggtcacgtttgcgcagaccgagcacgatatcccggcagatgccagcgtaaatctgtttatcaacgataacgatcgcgggacgcttgatgctatcgacgacagccattttcatttcgacagtactcaaacgagcgcgcttattaccgccctggagcaaaacgctaaaatcgagctggcgctcaatggccagcgcaagcggctgtctaacgcgggcagcagcgcggtgttcctcaagatcgatgaattccagcagcgcatcggcaccgccgatgcgctgctacgtaaaggcgacggtgacgacagcaccgttctgcgcgctattcccgcgcctgagatcttgagcgcgccgtttattcacaacgcccaacccgttgtgctcaacgcgaaacaacggcaaaaatggctgccgcaattagaaagcgtgctcaaccgtcagtgtgatgactggcaaaacgccgatattccatccagcgaacggcagatcaccgtcaccccgctggataaaaatcactcactactgcagaccctatgctggcgggctgcctataacgacggctacgcgatgtgggttgtcgataacacacaggccgccaggccgcagttgataaccactgatgcctccagctataacgatggcgtaatgaccttcttcaacaaagggcgcggcgtcgccgactgcgtcagcggcgaagaacgagtgtgggatggcaaaacctttgcgcaaagtctcgagtacagcaccggcatgtgccgggaaattaccccaggcggaacctggcagcttcccaccttcgtcagcaaggtgatttcccgccagcaacgagaggtcgatatactttcgctaaagacattgcgcgatgcggtcttaaaagagcaaaaacgcaacccggaactcgcattagaaaacattgcggaacagtttccgctcagcgggcacattagccactttactctcacctatgccgacgacgcaccggtctcgactaccaaaccagcggcggatatcagcgacgatgagtggcaggcgtttttacattccgatatcagcgccgattcggaaaacggtaaagtcagcttcacgcttatcgacctcgacggcgacggcaaacgcgacctcattatcgatagctacgtcggcggcaccggcctgttcagctatactggcgtgctgaaacgcggcgataacacctttgaatcggtgaacaatgccgacagcaatgacgacgataacttcgatgctggcgtgcccggcgctctttactctattaacgatcgcggagcgaaccagtggagccgctggatcagaatcaacggccaggtttacgccctgtggtttaacggcgtatttggggaagataatctctatctgctgcgtccgttcaatcagagcgacctgacgccggccatcaccatccgctaccgttataacctcaatatcattagcgctgcggaaaacgggcagacccccaccccagccttaaacgataaagataaaacggagttattgcgttcgttagaggtgatgcagagcaacctactgaaagataaatccacaggcggcaacgacgagccaatttgcccgatcccgcctggcactgcgaaagacgatgcggacagctactatggcggcgctgcaggacactatactgtcgaaacggtggcgtggatcccggtgtggctcaacgataaatgctttatcggcacgattttcagccatcatggcgcttaccgccatggagtggatgcgatcttaaccatcaattcgccacgagatgacgaagagatcgttggcgattacgacatctccggaaaacgccatgccatcgccatcaccagcggctggaaagttcgcgaaggcgataacggagtgatgtgattttaagcaaaacgcgccttttgacgcagaattgccgcaaagataagcaatcaaacaataaatagagaaatttcattgacgcagtgggcggattacggtttaatgcgccccgttgcccggatagctcagtcggtagagcaggggattgaaaatccccgtgtccttggttcgattccgagtccgggcaccacttattcagagaacccagcctatggctgggtttttgcttttctgcggcctaccgcgaaccgtaggcctgataagcacagcgccatcaggcattcaatgcccatcgtttttacctttaacttcagccatcggttattcatcactaacgcaggccttcagttcggatgtgacatactgcattgagtcacataaaaacgttaagatgcatcttcgtttcagccgcccctctttataagcccctaacgcaaaataatagtgccaatttatcttcaacccactctaatcagaacgtatttgagaaaaataagagcaatagcagcttatccggtaatgaaaattcatgctaatgactgttatgatagtgtcgaatatttaatcacaacaggaagtctgtgatttgcaagagaataacggaataagaatggctctttctcccgtacaacttgccgccgttctggccgataaatccgtcagtgagggggaaacacttagtaatcgcctctggggtggtctaggattggccaacggtctggttgaaatgtttggtgccggagtcatgtgcatagcccccgaaccaacaatgctcactaaaatcgggtgtgtcatcgtgggaacccacagcctggatacgatacaggcttcctttcgtcaggtatggaccggtaggcaggtcagtaccgatacatacaattctgtagtatctctggccgaaagtctgggttccgatcaccaaactgccgtgaacgttggaatgactctggatcttgcgattcctatgggatttgcgctgacaatgggtgctatccgcgttgcttctatacgtggaggacggataaaactggctgaacatgaatctttgaggagtcgctcatcaggtggccatactctccaaaatcatgttggcaaaacgccagaagggctgagaatgagactagataatactccccgattgaagtctgtcagtagtttcaaaagtaccagtgaagctgagcgcttagtatcagccgttattcaggacaataaaactcagatagagatgtgggtaagacatctaccaccagggatgaatgcaaaaatgcagttggatcgcatatttgcgaaccaaacgggaatattattattcaaaggtgcgaaagaagtaactacttgctacaaagtccgggtggtcatcgagtttgcgcactggcatggaaaaccctattttgtattgacagcctttcccctaccctgaacacggtttgtacatgacaaaaatgaacctgaatgaacttaacagctttatcacggtttacttcgggcaggattatgaccttatcgatgatagtgatgagatcgcccccaaaattgacgcatttatcgccgatagtcatctcgccatgaagtatggtcttatcgcagacattgaccttctgctgaaagaagcagataacccggaagaggaattcaggatacgctatggttcagactttgaccctcacctgtggggaacagatgcccttagcttcctgaaacgggtaagagatagaattagtcattccctgaatgaggcggagccgacaggccgtcagtaacccgcggcttcctcaccacactatcggtttggcctgattcagcgagatgtcgctgaaaacgctagcgccgcgtcgctttctttttagcgggaaggcggaacacttcgccattcggcttagcaattcccatacgatactgtgtctctctggctgccttgtggatgtcagcaaactcctctttacgcgccggcggcagcttcgtttttttcaggcatttattgcggtgcatccttatccattcacgatcgttgtcatcggcgcacgtctgcatcacatccacccaacgcgaagcggcccgacggtacaatccacgggcttccagagattcggcgatactgtccttgatcattcgataatttctctcacatatactagctaatttgcgtatataaatataaccacgtcatccgcagaaataacgaaagaaaaccccggtaatttgatccacgataaatccatgccaactcaatattgagggcatttataatattaattgctgtgtgcattaaaactgccgaagcagtaagtacttccaaagagcatttttatcatataccgcggattatcatcttggttattcctgaactacggttatacctatcaatcattgattaaattaacataataccgttgttgaatagcttgtatgtacataccttactctgcatgcattatcctttttatcgcttctgcgcgggacactccagcagtctatttttaaagataaacagacaggcctcattaaagttggccaatcccaggcgttcataaagctcaatgcgtttgcgatacaggcttttcactgaagtattaagtaccccggcaatttggtccatcgtcattccggccctgagtaaagtcaacgtcatatgttcctgtggtttcaggcggaaattcttgagccattctcgtgtcagccgcttactcttcacatcaagaaacagactaaataaattagccatatccgtcggcgtcaaagacatgttcagaaaccacttcaggctcaacaaatgctcttcccgatggcgcatatcaagcataatacagcagatacgtttacccgcttccgctgcgccaggaataagataatcataaaaacaaagcggcgcccgactatccaccaacaccgaaaactcttcggcatcactctcaaaaagcttatgctcaatcgaatgtaactggatgatatctggaaagaaaatcctcaccccttcaaagagatagtgatcctgagtcactaaaaacattgtcgttgccataaatcatccctttaacaataaagcaacataacccctccagggagaatatgcgcagcacctggtgacgtgctgactatggcgagcaaaataaagcagatttttgtcgttttagtaatcccccgatctctccatctatagtgaacgttccactccactactcttaagtcatttcctaatcacctgcactttggctaattataaataaaaaactcgcacaaaaaagaagcttttctactattgagaatttttgtcaaaaatcgtcttaaatatctacagcaacggtcttatattatgtatgaaaaagcaaaccaaaaacattaaaacagaatttctgacatcacctaactttttccaattcagttagttatgcgtaacaccagacaattaattaatccataaaagcccaaattccagatttatcttaaaacaacagggctattatttgacatattttcaggcaaacatatcaggtgtacattaatcctaccccgttatcgcgaggagatattttattacctttaataagtaatcgcagtcgcgtatcgtcaggtaaaaactcattaccctatccttttgcattctgctaaaaggccgacgtgttgtgcaatggattcttgatggacatatggtaaatagttatgggaagatcaacgcgtttcaataagttattcttttatcgccgcacgacattctcgttttcaattagtttattgttgttaacgcctattctggctcaaggggctgagtcgatatatgatcagcatgtactacaggcgcgtgaagggaattacgcgccgtttctcgattatcttcagcagtatcaacaacagcatgccttgacgcccgagcagatcgccgactggctacaaattgcctcctgggccgggcgtgataaggaagttatccaggtctggcagcgctatcaggtttatatggcgctacctgcacgcggtgctgcggcagccgcacaggcttaccgtaatcaaaaacagtggtcttcggcgctggcgctttgggaacaggcgctcagccaacagccgatgaacgacgattatctcattggccggattaaaacgctggccgatgcgcgccgtgacggacaggcgctaagtgaagcccgccgcttagtcgccacaacgcccagcgccgctcacctacagacactctcctacgtctatttacgtcagggaaaaagctgggaccagctgctcaccgatatgcgtgcgcaggaactcgcgccgcaaaacagagaaacgctaaatagcctgattgagagtctgagcagtaatcgtatcagtactcccgcactgcaatggtcagcaagaacgaacttgacgcccgcacagcagcgaaagctggaaatggacgcggcggcggagtgggtacggctggcggacacccctgcccgcggtgaacaggagcgctttcgcctggcgcaaatggccctcaaccgctacgacgcgctgttcgcccgttggcgtcaggatccgcaggccgcagaggatcttgcccgcgcgcgtattgaccgcctcggcgcgctatacacccacggctattacacccaggtcaccaaagaatatcagtcgctgaccgccgctcagcagcccgttcctgactgggccatcggctgggttatctcctcttatcttgcgcaacagaacgtcggggccgcgcaggcgatcgcccgccaacatcccctttatcgaccggatccgcaagatgatcagcatgagttattttacgcgctgctggatagcggacagtatcaggccgcccgcgactatctcgccaaagtgactaacggtgtcccctacacccgccgcctctacggctcgccgacgccgcagccaaacgatccgtggctgaacgctcaatcgctgaaggtacagtatttactgagtactaacgcattgccggaagccgagcgtctctcccgccgactggccgctaccgcgcccggtaatcaggggctgcgcattgactacgcggcgatactgcaggcgcgcggtttaccccgtgccgccgaacgggaactgaaagcggcggaagcgttggagccttcgaatattcccctcgaacgccagcaggcctacgtagcgatggatcttcaggagtggcggcagatggagctattaaccgataacctgctggcgcgcagccctgaagacctgagcacacaaaaattagctcgcgctcgcgaggtgcaccatatgtcggaattgcgcctcaacagtactcaggggatccactcggataacccggtcagcggtagccacgattttagctgggatgcggcgatttacggcccgccaatcgctgataactggcggctttttgccggtaatcgattcgccaaagggaattttgatgaaggaaaaggctccagccgccagctctttggcggcattgagtggcgaccgcgtgatgcctgggctgaactggaaatctccaataacagtttcgccggcgacaacaaacccggcgcccggctttccgcctggcaaagtttcaacgatcgctggcagattggcggcgaggtcgaacgcctgtcgcgccagacgccgctgcgcgcgctgcgcaatggtatcagcgccaaccgcggcgaggggtgggttcgctggtatcaaaacgagcgacgcgaatatcgctttagcgccgccgccagccgcttctccgaccacaaccgtcgtcaggaatataccttctccggcaaagagcggctctggcaatcgccaaccatcacgctcgatctggaacctgggctctccgccagcgccaacagccgggcggataccctctactacaacccgaaacgcgacttctccgccacctcggcgctggtcgccgatcacgtcatgtatcagcactacgataccgtctggagccagcagcttgcggcaggcggcggcgcctactggcaaaaagcgtattcggccggcgctatcgccatgctcggctacggccagcgtattcgctggaacaacgtgatcgacaccggcgtgatgctgaactgggacaagcgcccttacgacggcaaacgtgaaagcaatctctccattgcccttgatgcgaatttacggttttaaggataaacatggtcaacaaaagtatccgcatcagcctgatggttatcggctggctcctgatgacctgcgcgcttcgcgcagagacgattccttttctgccgccggacgcgcggttgcagccggaggcgaataagccctggccgcagaataagtttttggtactggcctatcacgatgtggaagacgatgccgccgatcagcgctatctggcggtgcgtaccagcgcgcttaacgatcaaatcggctggctgctgcacaatggttataaggccgtcagcgtccaaaatattctcgacgccaacgcggggttaatcaccctgccgccgaaggcatttctgctgagtttcgatgatggctacagcagtttttacacccgggtctggccgctgttaaaagcctggaatgtaccggcgctgtgggcgccggtaggcagctgggtcgatacgccggagcagaaaaaagtcgatttcggcggtctgatgacccctcgcgagcgtttcgccacctgggagatggtgcgcgagctcgcgcaatcaccgctggttgaaatcggcgcgcatacctgggcttcgcactacggtattcaggccaatccgcagggcagtcgcgaaccggcgattgccaaccgcttttatgataaagccagcggacgctacgaaagcgaccagcagtttcaccagcgcatcgataccgacgtgcgcaaagtgagcgacaaaatcgccgacgtcaccggcaaagcgccgcgcgcctgggtatggccctacggcgccgccaacggcacatcgctggctatcgccaaaaatcgcggctatcaactggcgtttaccctcggcgatggtctgggcgacgtgcgcgatctggataatattccccgtctgcttatctccggtaatccgtcgatcaaggctttcgccagccaggtgacgcaaatccaggagcgtgaaccggttcgggtgatgcacgtcgatcttgattatgtctacgataaagacccggctcagcagcgtaaaaatatcgataagctgatccagcgcgtctacgacatgaaaatcactcacgttttcctgcaggctttttccgatccgctcggcgacggcacggtgaaagcgctctacttccccaaccgccgcctgccgatgcgcgccgatctgtttaatttcgtcgcctggcaattgcagacgcgcggcggcgtcaaagtgtatgcatggatgccggtgctggcgttcgatctggacgattcactgccgcgcgtacagcgctgggatgcacagagcaacacgctgcgccaggccactcgcccctatatacggctttcgccatggaatagccaggtgcgcgaccagatccgcgatatttatcaggaccttgcccgcttcgcgaccttcgacggcgtgctgttccacgacgacgcggtgctgacggattatgaggatgccggcaccggggcgatggccgcctggcgggcggcgggccatcgggaggatatcgcgcagatccgccaaaaccccgccgcgctgcacgcctggacgcgttttaaaagccagacgcttatcgacttcacccgcacgctcagccagagcgtgaaagcgattcgcggcccacaggtgagaaccgcgcgcaacatctttgccctaccgatcctgcagccggaaagcgaggcctggttcgcgcagaatctggatgattttctggcggcctacgactggacagtgccgatggcgatgccgctgatggaatccgttccggtcgcggaaagcgatgcgtggctggctcgcctggtgcgcgccgtcagcgccaggccgggcgcattgaagaaaaccatttttgagctgcaggctaaagactggaatctccctcagcagaacgccatccctgaccaacagctggtcgactggatgcggacgttacagctcaacggcgtcaacaattacggctactaccccgacgatttccttaataatcagcctgatatctcgaaaatcaggcccctgttttcatcgtactggtatcccaacaatgactgatcgcattatcgcattttcgattttatgcctggttttcgggctgcctctgggcgtggccgccgttttcaccggcgaattgatactggatttcgtctttttttggccactgtttatgtcggtgctgtggataaccggcgggctctacttttggttccaactggagcgccactggccgtggggtaaagagaccccgccgccggagctggcgggcaatccgttgatctccattttgattccctgctttaacgaggagaaaaatgcccgcgagaccatcgaagccgcgctggcgcagcgctatcgcaacattgaggtgatcgccatcaacgacggctcctccgacgataccgccagggtgctgaatcaactggcggaagagtacgctctgctgcgggtgattcatctggccgaaaatcaggggaaagcggtagcgctgaaagccggcgccgccgccgcgcgcggggacttgctggtgtgcatcgacggcgatgccctgctcgatcgcgataccgccgcctacctggtggcaccgctgattcagtatccccacgtcggcgcagtgaccggcaacccgcgaattcgtacccgatcgacgctgattggccgcattcaggtcggcgagttctcttcgataatcgggctaattaagcgtacccagcgtatttacggccgggtgtttaccgtctccggagtgattgccgcttttcgtcgccaggcgctggcggacgtcggctactggagcccggatatgatcaccgaagatatcgatatcagttggaagctgcagctacgccattgggcgattttcttcgagccgcgagcgctgtgctggatcctgatgccggagacgctgaaggggctgtggaaacagcggttacgctgggcgcagggcggcgccgaggttttcctggtcaatctgcgccgcctgtttcgctgggagcatcaccggatgtggccgctgttcctcgaatatgccctctccacgctgtgggccttcgcctatgcggtcaccatttttctgttcatcgccagccattttgccccgctgccggaaaacctgaccgtccgcagcctttttccgccggaatttaccgggctgctgctgggggtgatgtgtctgctgcagtttatcgccagcctgtacatcgaacggcgctatgaacgcggcgtcgccggctcgctgttctgggtgatctggtttccgatggtgtactggatgattggcctgttaaccaccatcgtcgccttccccaaagtcatgttgaaacgtaaacgcgccagggctcgctgggtcagccccgatagaggtaaaggaagaatgtcatgaacgaacaaaccctgatattaaccgagcatcgtatgttgccgcggatctttgacggcgtgttaaccgctatcgcgtgggctggcttcgccttttttctgtatgccaatttgctgatgcagtttaccgagcgcggtaacgacagctgggacgcgattatggcgtcgtttaataccgtactggtctatttgctggtcgcggcaattaacggctggctgctgattttgtggtatcaatacaatttacgccgttataacgcgcggcggcacggcagcatggcctcgctgcgccatgaagagctggcggagagctttaatatcgcgccacaaatcatttccgagatgagccagtataacctgctgacggtataccacgaccagattggtagaatcattgatttaaaaatcaatcagaacgaggaagacgaacggtaacgacaccaccaaaaaggccgcatcatgtgcggcctttgtgcttacggggcggtgagattagttaccgccagctttcttaatcgccgcatccagcgaggctttgtcagccagtcccgggaagacggtaatggtcgcttcggtcgcgccggtagtcggcatgacaatcacgcctggcgtaccgcttaagccaatctcctgcgccagctgattaatgttttccagcgccggttcgacgtctgccgcttttttggcgtcaaagttcaccttcttcgcctgctgctgaatgtccgccgccgtcagtttaccttcgttatgcccggttgcgtaaacgccgttgtggtaagtcaggtaggcctcggcccctttctgttgatatatctgcaggccggttttcgccgcatccagcgaagttgcccagcggctgccgaaaatcggccactctttgaaggcaaaacgggtttgcggatggtctttaatcacctgctccataaccggtgcgaggcggctacagtagatgcattgataatcgaagaactcgataacggtgactttaccgttagccgggccgtaggttggcgtggccttatcctgcgtcagcttgtcggcattcttgattaccgcctgggtagcggcgctggcctgctgctccgcctgaatttgctgcagcttttggctggcctgcaatagcacttccggatgagcgaccaggtagtcagcggcgattttgccgatacgcgcttcctgctccgcggtgaaagtcgcggccggcgcgtcagcggcgctggccagcgccggcagcagggaagcgcccgccagggcgagaataagtagattcttgatgccagacatattgaaaagtccttacgaaaaagtagacggcaggtgagcctaatcggacaaaatatcatcctttggcggcgaatcattgtcagtctatgcattgattcgtaactttatttgtcagacgccacgcttccccctacggcttgaagggtggtcaggggcgaagaacgggagtaccctgcgcccatcttttttgatcgacattatttgcaatacgagccaggcatgaacgaaatattgagtcagtgggacttcgccgtcattttgctacaaatcatcgccatcgatttgttattaggcggcgataacgcggtggtcatcgccatggcctgccgcaagctgccggcgcatctgcgcaccaaagccattgttatcggtactctcggcgcgattatcgccagggtcgcgctgctggcggtggctatctatttgctgtcgttgccgtggctaaaaatcgtcggcgcgttactgctactgtggattggtattaagctggtcgccaacgaggaagaagagagcgatatcagcagctccagtagcctgtggcgcaccgccgtcaccatcaccgtcgccgatgtgatcatgtcgcttgataacgtgctggctgtggccgccgccggtaaaggccatctcctgctggtggcgctgggggtattaatcagcattccgattattgtcgcgggcagtaagctggtgttggctatactgactcgctttccctcggtcgtcttactgggcggcgcgctgattggctggattgccggttcgatgatgataaccgacccgacctttgttcagctgttccccaattcccggattatctacattttgttgccggggccattggcgcggcgttggtgctgctggaaggatggcggcgcaactaccgctccggcaccccagaataatcactgaacgccgtcacccccgacggcgtcaagttttcgccacttttctccgccaccctttctcatttgccctacgcttaatagagccgcctgatccagggattctgtgaccagatttttgagcataaatgagataacaccatggaattaaaggattattataccattctaggggttaagccaacggacgatctgaaaaccatcaagaccgcctatcgccgtttggctcgtaaatatcaccccgacgtcagcaaagaacccgatgccgaagcaaaattcaaggatctcgccgaagcgtgggaagttctcaaagacgatcagcgtcgcgccgaatatgaccaactttggcagcaccgcaacgatccgcagttcaaccgccaacagcacacccacgaacaaagctacagccagcaggacttcgacgatatcttctcctcgatgttcggccagcaggcgcatcacgcccgccgccagcgcgccgagcgcggccacgatgtcgaaatcgaagtggcggtgttcctcgaagaaaccctcaccgaacagactcgtaccatcagctacaagctgccggtctataacgtcttcggcatggttgagagtgaaacaccgaaaacgctgaatgtgaaaattccggcgggggtcagcgatggccagcgaattcgcctgaaaggccaggggacgcctggcgaaaacggcggtccgaatggcgatctgtggctggtgatccatatcgcgccgcatccgctgtttgacatcaacggtcataacctggagatcgtactaccgctggcgccgtgggaagccgcgctggggacgaaagtcaccgtaccgacgttaaaagagagcattctgctgacaattccagcgggtagtcaggcgggacaacggctgcgcatcaagggcaaagggttggtgagcaaaacccacaccggcgatttgttcgccgtcatcaaaatcgtcatgccgccaaaaccagatgaaaaagcgcgtgagctctggcagcagctcgccgaaagcgaagccagcttcgatccgcgtaagacatggggaaagcctgatggctaaagtaacagtgacgtttaccatcaccgagttgtgcctacgcaccggggtgtcggaagaggagctgacggagattgtcggcttaggaatgattgagccacaccagccgcaggctgaaacctggctgtttgacgacagcgcggtgacgattgtgcatcgcgcagtacgcctgcgtaacgagctggagctggactggccggggattgcggtggcgctgacgctgctggatgaaaatgcgcgccttacccgcgagaatcgcctgctgcagcagcgactggcccgctttttaacccacagctaagtggaatttcccggctaagcgcagcgtaagccgggaaaagcgcttaatccggcagcgagccggcgagattacgcgcggagacgctctcgctcaccggtgaaggcggctcaggcgccttaaccggcgcggccgctggcacggatgccggagcggaagaggctggctgaatctcaagaaacgaggccagcattctgcgcagcgtctccggtggcgtatcttccgccagcagcgccgccagcattgacggcagccggctatcaacttcacccaacgctaacccggccaacagcgccgtacgcgacatatcccgcgatcgccgcggtgatgggcctcaattttcgcgtccgcaaagcgctcgctggcgctgatatccgggcgcaggtatatcagaacctttctgcgatccagagtcatagacgctccttaaccaataattttcagaccacgcacgagggcgaactgcggctcgtcggccaccacaaagcgatcttcgcgcagacccatacgttcgcgaatcgcatcggcaaccagcggcgcgccgccgccaatcacgatggcgtgcgaatagcctttaaaactatcaatcgccgtcagaacacgagtcgtcaggcgttcgatgctattggagataacctttttcacctccgataccgcatccggatcgttgatgttatcggtcaaatactcttcgtcgtggcggttgatgattatctgatcaacgttataactggaggtatcggtattcgcccgcgccagcgccagcttaacggcgtcggtcaccagcgacacgcccagcttcgggtcgccgtaaatgcgcgaaaccgaggtcatttgcccggccaccatcgaaatatccagcgtggtgccgccgaggtcgacaatcagcaccgaatgcgacggtttcagctcatcgcacaggctgatacccgccggaatggattccggacgcacggtgactttggtgatattgaacaccacgcctttattcagtttaacttcgcgaagcaggctctttttcttacgctcaatgttatcaagacgatattgcgcatcttcatcataaaattcggtcagcggcagggtgaccacaatctcgacatcctgcggttccagaccgctggtcaacagcgcatggtggacagcgatggagttcaacgggctgtattgccaatcaatattgttggtgggtaatgcatcgggggtgatcaggtcgaaagagtacttttcatcatccacggtgtagttaaatggcttcccggcgccgaaggtggcagaccagcctcgtttaaaactattggggctgatatgggtgaaagtttcgccatcttgctcccacagcattttgatattggttgaaccatcatcgataaaaatgcgcatcgcattgctccatcactgagacaaagaagagaaaatgtaagacccaaaaagagtagcaagagttaaaaagcagcgcaagagcacgaaaaagagacaattccgagttttatttgagaaacaatggagatttcgattaacccattgagttcaaatagagaacttatagagacaaaacagagaactaaaaattttcatttctgtctattttaaacgctatttttgtgcaaaaagagagcatccctcccctctttcgccagcggtttgcgcacgctttttacacctgattgggtaccacaatcggccgttccggctcgacgacattttccggtacccgacgatatttatccagcaggtgaatctgaatacgtcgcaacatatcgccattcagcttgtaataacggaaatagagaaacagcgtcagggcaaaaaagagcgtcggcagcgcaatcataatcgcctgcatccccagcaccgtgtggggcgactgcacaacattcggcacgtagccaatgatacccagcacgatggcgataaaccaggccgcaaacgccgaaccggcttttaccaccagcgtctgcaccgagtaggcgatgctttcgcagcggatattcatcgtatattcgccgtagtcgacggtatcggccaccataatgacctgcagcacccagaacagcgcagtgccgatattcaacagcaccccggccagcgaaatcagtgcgatgttgtaaacgccgctcagcgccatcatcaacagcacgccacagcctagcaccggcatgatcgatgcccccgcccacagaatgcgccgcgacagcccttttaccagtcgagggaacaagatcagcgtcagtaaattcgccgccccgcgtaggacatgtaatacgggaacatctccgcgctgccaatgacgtaggtaaagtaataaatcgcgaagccggcaatgatattcgccgccgtgttataggccagcgccatgcccaacaggcaggccagctgatcgtttttatagatgagcgccaccatctgacgcagtgaaagatggctggaatcctcgctcatgccgctatccgacgagtaaacctcatggacgttgcgcaaggtaacgagggtggaaaccacgaagaaggcaatcagcaccagggtaaacatctggaaaccgaagccgcgatcggcgccgccgacggcgctgacaaacggcagcgtgaccccggccgtcacaaacccggcaaggctggcgaaaaagcgcgggtaaggcaccagctgttcacgttcgcgtttatcaagggtaatggtcggcaccagcgaccagaacggcacatccatgatggtataggtgaagccccacagcaggtaggtcagccacacccacgccagtagcgctccgccgctgaagtgatgggcgctgaacagcatatacagcaccaccgagttggtgatagtcccgatcaggatccacggcttgaacttcccccatcgcgatcgcgtgcagttgacgatccatcccatgatcggatcggctatcgcatcaaggatcctcgccaccaggaacaaggtgccaaccaccccaaccgataagccaacaatatcggtgtagtaatacatcagatacatgtaaacgataccgatagcgaaatctttaccaaaagcaccaaatccgtagctgagctttgttgtcattgaaatactcatagggtacaggtcgctgtcgccagcgcctcctttagcgtttgatagagcatggcaggcgccgccgggtcagatccccggcggcatgagaaggttaacggtgcagccactccggcagccagtcaccgtggctggcgatcagatcgtccaccagcgcgtagatctcttcgatccccagcaccgcggcggtgtgcggatccatcatcgtggcgtaataaacgtaatcgcgattttccgtcaggatggcctccgttagcagcgtctgcacgttgatgttggtctgcatcagcgccgccagatgcgccggcagcgcgcccactttcgtcggctggatgccgttggtgtccaccaggcaggcaacttccacgcaacagccctgaggcaggttgtcgataagattatcgttgcgcacgttgccgtacacgacgcttggctcgccggtccagatagcgttcatgatggtgctggcatactcgcgcgaaggtttaacatctatacgctcgccgcttttatagctctccagctctttatgccagttggccaactgctcgacgcagcgtttagggtactcatccagcggcactttataacgggcgataagatcgtcgcgtcccggcttgataaaccatggcgtgtattcggcgaaatgctccgacgattcggtgacaaagtagcccagctttttgaacatctcatagcggacaatgttttcgcagcgcggattgccgtgcaggttcggcttcggcgcccgcccttccgcgtaggcctgcagcaggtcgggatagatactgacgtagctgccgtccgcgagctttttctccagcgacagatagaacgccatatggttaatacccgcgcagcggtagcgtaaatccgccgggtcgaggttaaggtcgcgcgccagctcttccgctgtgccttgcaccgagtggcacagacccacctgcttgatatgcgggtagcgggcgtacatcgcccaggtattcatcgccatcggattaacgtagttaagcatggtggcatccgggcagacctcggtcatgtcgtcacagatagcccacaggtgcgggatggtgcgcagcgcgcgcataatgcctcccggccccagcgtatcggcaatggtctgctcaaggccgtgacgtttacagacttcgaaatcggtgacagtacagggttcatagccgccaatctggaaggcgacgacgacaaaatcggcgccgcgcaaggcggttttacgatcgcgatggcagctaatttcgccattcgcaccgacggaatccatcagctttcgcaccacggtatgcgactcttccagccgggtttcgtcgatatccatcagcgcgatatgcgccgatttcaacgccgggcgctggaaaacatcaccgagaatatttttaacaaacaccgtcgaaccggcgccgataaaggtaatttttggggcggacatcgcgctctctccatcaggtcattgaacactttcagagtggcatgccgctcgccgctgcgctgccccgttcccaccggagcattcccgaaaactcagatcggccattgaacgccactaaatctgagtttttgggaataaatcggcttaaaaggagagaagacgggccgattattccgctaagctgtaatcagttcaggctaaaaacgcagccactctgacgatccaggaatccgcccatgatggaacaccgcttcacttctctgccacccgacccgcacatgtgcagcagcgatgaaaagcagagccgcagcccgctggcgctctattccgagtatcagcgcatggatatcgaactgcgcccccgcacgccatggccaccagccactggcacggccaggtagaggtcaacgtgccgttcgacggcgacgtggagtatttgattaacaatgaagtggtgcgcattgagaaaggctatatcaccctgttttgggcctgtacgccgcatcagttgacccgccccggcgactgccagcagatggcgatattcaacctgccgatgcatctgtttctgtcgtggccgctggatcgcgaactgataaaccacgtcacccacgggatggtgattaaatctctcgccgcccagcagttaagcgcttttgaagtacgccgttggcagcaggagttgaatcacgagaatgaacagattcgccagttggcgatcgatgaaatcgccctgatgctcaagcggctgagcctcgccggctggcagccgattctggtcaataagacctcgcgcacgcacaagaacagtgtctcgcgccacgcgcagttttatgtcagccagatgctggaatttatcgccgcccattatgaccaggcgctgaccgtcgatgccgtcgccgagcacgttaaactcaacccgaactacgcgatgggcgtttttcagcgggtgatgcagcagaccatgaagcagtacattaccgccatgcgcatcaatcacgtgcgcgcgctgctgagcgacaccgataagaccatccttgatatcgccctcaccgccgggttccgctccagcagccgcttctacagcacctttacccgctacgtcggcatgccgccgcagcagtaccgtaaattgagccagcagcgccgccacagcctcgcgtcgccgcagccataaaaaatgccgccggggtctccccaggcggcatcgtgaacagtgaaaagcggttagtcgttgatacgcggatgctgctgtaccagacgggcgcgtttttcctgcaggtcggcgatttcctgatcgatatcttcgattttatgctcgatgttatcgtagtgttcgcccagaatttctttcgcttcctggatatcggacgccgccggcgtcgcccctttcagcggacggttagcggtctctttcatcgacaggccggtaatcaggccaatcaccgcaatcaccatcagatagtaagccggcatcatcaggttctgggtcgtttccaccagccatgccgccagcgtcggcgtcagaccggcgatcagcaccgagatgttaaaggcgctggccagggcgctgaagcggatgtgagtcgggaacatcgccggcagcgatgaggccatcacgccgataaagcagttcagcaccactgccagcagcagcagaccggcgaagatcaggccaatcacgttactgttaatcatgataaaggccgggatagacagcgtgaacagcgcaacgctacccaccaggataaacggacgacggccaaaacggtcgctcagcatgccgataaccggctggacaaacaacatgccgaccatgatagcgataataatcagtacgccgtgatcttccgagtagtgcaggttgtgcgacaggtagctcggcatataggtcagcagcatgtagtaggtcacgttagtggaaatcaccaggccaatacaggtcagaaggctgcgccagtgtttggtggcaatctctttaaaggagactttcggaccttcctgcaggccttcgcggtcgccctgttcaagggtatccacgtgctgctggaacgccggtgtctcttctaacgcgtgacgcaggtacaggccgataatccccagcggcagcgccaggaagaacggaatacgccagccccagtcgaggaagttctcttcgcccacgacgctggaaatcagtaccaccacgcctgcgcccattacgaagccggcaatcgaaccgaagtccagccaactgcccataaacccgcgtttacggtcaggcgagtattcggccacgaagatcgacgccccggtatattcgccgcctaccgagaagccctgcgccattttacacaacagcagcagaatcggcgcccagataccaatggtggcatacgacggaataagaccgatacagaatgtacttatcgacatgataacgatggtgatcgctaagattttttgtcgaccgtatttatcgccgagcatcccgaagaacaggccgccgagcggacgaatcaagaaaggaaccgagaaagtaccgagcgcggcaatcatctgcacgctgggatcggcatcggggaagaagactttaccgagggcataagccacaaaaccatatacaccgaaatcgaaccactccatcgcattaccgagcgaggccgcggtgatggcttttcgcagcttgccatcatcgatgatagtgacatccctaagcgtaatcggctttatttttttccttttaagcatacttttcctctgtgctatcgccttgagcgcacgactcctcgccaaatgacgaggtcattcgcgacgtacgttgggagcggcgaagtgctgtgctccacatttcaagcgtagcaggtttgcctgcactgtctttctgacagagtgtacaaccgaacctgttgacgcctgctctggccttaaattaataattcacttaccaaataagcagtgacgaatttacttacatccctttttaccctaccagcgtttaaatttgggatcaacttcacgaaaaattcgcccagcttaattacagagccaaataaaatgaataagttcaatctctgtttcgccgccgatgtttatttctggactttattaacgtctgtttttcagcttattctccgcaaagccaaaataattaccctgcgttatttcctggaaaaaatacccgacaaaagtgcgggattgcgctataatcagccgcactttcggctcacagccgctgtttaacggaccaacgtcctgtttttcccagtaatcacgaggaacgccatgcaacttccacactgcccaaaatgccattctgaatacacatatgaagataacggcatgtacatctgcccggaatgcgcccacgagtggaacaatgccgagccggccgacgatgccgacgcgctgattgtaaaagacgctaacggcaacttacttgccgatggcgacagcgtgaccgtggtgaaagatctgaaggtaaaaggcagttcttccatgctgaaaatcggcaccaaagtgaagaatatccgtctggtcgaaggcgatcacaacatcgactgcaaaattgacggttttggcccgatgaagctgaaatctgaattcgtcaaaaagaactaattaattttttttacgccagcgccattatttttccggcgctggcggcaacctcgccggcatgtccgaatatcagcggcggatcgcggcgaaattattttgctaatttcgcgaaaattattcccgaaatctccaggccgaaccgcgcgatcaattctcatttcgtctctgccttcccgccacgcggcgacgcattttcagaaaaattcaccccgctttgccgcctggtttctttttcccgtcaccaactacgctttatgggtcattggttatctgaggtcatggttatgtccctgagtccttacattgcttttagcggcaactgcgctgccgccatcgccttctatcagcaggcgctgggggcgcagcttatccaccaaatcacctacggcgaaatgccgcagagcgcccaggatgccgaagatggttgcgcctccgggcaacatcttgccgccgactgcatcgcccacgccagcctgcaggtcgccgacagtattctgatgctgagcgatagccccagaagcgacatggaacattacgcgggattcgtcctcgcgctggagccgaaagatattgctgaaggtaaacactggtttgaggcgctggccgatggcggacgcatcgaaatggcgtggcaggagaccttctgggcccacggtttcggcaaagtggtcgatcgcttcggcgtgccgtggatggttaacgtcgtcaaacaaccctaatcttctccacagggcggcttctccgccctgtcatctcaccggcattaactcttcatcctgcggtcatcgtgacttaacaggaatgtaacaaaaacgcgtcagtatcggcccacgctcaacgggatccccaaggtgcttagtgaggctagataaccatgtacctatccagacatccgaccagttatcccacccggtatcaggaaattgccgccaggcttgaacaggagctgcgccatcactatcgctgtggcgattatttgcctgcggaacagcaactggcggcgcgctttgaggttaaccgccacaccctacgccgcgccatcgatcagctggttgaacgcggctgggtccagcgccgccagggcgtcggcgtgctggtattgatgcgccctatcgactacccgctcaacgcccaggcgcgtttcagccagaacctgctggaacaaggcagccaccctaccagcgataagctgttgtcggtgctgcgcccggccagcagccatgtcgccgaagcctttggcattgccgaaggcgaaaccgtcattcatctgcgcaccctgcgtcgggtcaacggcgtggcgctgtgtttgattgaccactacttcgccgacctgcgcttctggccggtgttgcaaaccttcacccacggttcgctacacgacctgctgcgcgaccagctcgctatcgaactgacccgcgtacgcaccaaaatcagcgcccgtcgtgcgcaggcgaaagagagcaagctgttggaaatccccaatatggcgccgctgctgtgcgtacgcacgctcaatagccgcgagggcgagacagtcacgacggagtactccgtcagcctgacccgcgccgacatgattgaattcaccatggagcactgaatgcacttcgataccgccacccgccagcgctggatgtccgtgctggcccacagtgaaccgcaggaccttctggcgcgcatgcaatcgctgcggctggcgccggagtatgaattaattcgcgccccggaaaccgggctggtacagctccaggcgcgtatgggcggcatcggcgatcgtttctttgccggtgacgctaccctgacccgcgccgccgtacgcctgggcgatggcaccctcggctacagctggattttgggccgcgaccgccctcacgccgaacgctgcgcggcgatcgatggcctgctgcaatcgcctcactattttcacaccttaatggaaaccctcattaccccgctggaagcacaacgcagcgcgcgcctcgaagctcgccgcgccgaagtcaacgccagccgggtcgacttctttactctggttcgcggagataacgcatgacattacaaaccgcctttaccctaccggtgcaggatgcccaacacagtttccgccgcctgctgaaagcaatgagcgagccgggagtgattgtctccctgcagcagcttcagcacggctggcagccgctgaatatcgcctctaccagtctgttattgacgctggccgatcacgacacgccggtgtggatggccgccgcgctgcataacgatctggtcagccaaaatctgcgcttccataccggcgcgacgctggtggaacagccgcagcaggcggtatttgccgtcgcctgcgacaccatcagcgccgaacagcttaatgtcctttccgccggtactgctgccgcgccggaaaccggcgtcacgctgattgttcaactagccagcctgagcggcggacgcatgctgcgcctgaccggtgcgggcattgccgaggagcgaatgatcgccccccagctcccggactgcatcatcgacgaattaaccgaacgcccgcacccgttcccgctgggcattgacctgatcctgacctgcggcgagcgcctgctggctatcccgcgtaccacccacgtggaggtgtgctaaatgtatgttgccgtcaaaggcggcgagaaggcgattagcgccgctcacgccttgcaagagcagaaacgacggggcgatggacggcttcccgaagtgagcgtcgaccagataagcgaacagctcagtctggcggtggaccgggtgatgaccgaaggcggcatcgccgaccgcgaactggcggcgctggcgctgaagcaggccagcggcgataacatcgaagcgatcttcctgctgcgcgcctaccgcaccaccctgccgcggctggcagtcagcgaaccggttgatactgccgggatgcgcctcgaacgccggatctccgcggtgtacaaagatatccccggcggccagctgctgggccctacttatgactatacccaccgcctgctcgattttaccctgctggccaacggcgaaccgccgtcggtgcagaaagccggtagcgaaacgcagccgacgccgcacgtcttcaacctgctggcgcagcaggggttggcaaaagcggaagtagaccgcggcgcgccgcctgacgatatcacccgcacccgccggtctatccctgctcgcgctcctcaaggctgcagcagctggtacgcggcgatgaaggctatctgctggctctggcctactcaacccagcgcggctatggccgcaaccatccgtttgccggcgagatccgcagcggctacgtgcaggtggaaatcgtgccggaagagctgggctttagcgtcaatattggcgagctgctgctgaccgaatgcgaaatggtcaacggttttgtcgatccaaaggatgagccgccgcacttcacccgcggctacggcctgacgtttggcatgagcgagcgtaaagcgatggccatggcgctggtcgaccgtgcccttcaggcgccggaatacggcgaagagataagcggaccggcccaggacgaagagttcgtgctggcgcacgccgataacgttgaagccgccggcttcgtctcgcatctgaaactgccgcactatgtcgatttccaggccgaactggcgctattgaaacgcctgcaacgggagaacgaacgtggctaacccactgactggctataactttgcttatcttgatgagcaaaccaagcgcatgatccgccgggcgatactgaaagcggtggccattcccggctatcaggtacccttcggcggccgcgaaatgccgatgccctacggttggggtaccggcgggatccaactgaccgccagcgttatcggcgagaacgacgtacttaaagtcatcgatcagggcgccgatgacaccaccaatgcggtgtcgatccgccagttctttaaacgcgtaaccggcgtcgccaccaccgaacgcactgaagatgccaccctgatccagacccgccaccggatcccggaaaccccgctggtggaaggtcagatcctgatctatcaggtgccgatcccggagccgctgcgctttatcgaacctcgcgaaaccgaaacccgcaccatgcacgcgctggaagagtacggtgtaatgcaggtgaaactgtatgaggatatcgctcgcttcggccatatcgccaccacctacgcctatccggtgaaggtgaacggccgctacgtgatggacccttcgcctatcccgaaattcgataaccccaaaatgcacatgatgccggcgctgcagctgtttggcgccgggcgcgaaaaacgtatctacgcggtgccgccctataccacagtcgaaagcctcgatttcgacgatcacccgtttagcgtgcaggagtgggatgaaccctgcgccatttgcggttcgcgtcacagctaccttgacgaagtggtactggatgacagcggacagcggatgtttgtctgctccgataccgattattgccgccaacagagcgaggcgcagaagaaatgagccagccgttacttacagtcaaccacctgacccatctctatgcgccgggaaagggttttagcgatgtctctttcgagctgtggccgggcgaagtgctcggcatcgtgggcgaatccggctccggtaaaaccacgctgctgaaagcgatttccgctcgtctggcgccgcaacagggtgaagtgcggtatcaacagcgctcgctatatgccatgagcgaagccgaacgccgtcgcctgttacgcaccgaatggggcgtcgtgcatcagcacccaatggacggcctgcgtcgccaggtctcggcgggcggcaacatcggcgaacggctgatggcgaccggcgcccgccactacggcgacattcgcgccaccgccgaacgctggctgcaggaggtggagatcccgccttcccgcatcgacgacctaccgaccaccttttccggtggcatgcagcagcgcttgcaaatagcccgcaatctcgtgacgcagccgaaactggtgtttatggatgaacccaccggcgggctggacgtctcggtacaggcgcgcctgctcgatctcctgcgtgggttggtggtggagctgggtctggcggcggtgatagtcacccacgatctcggcgtcgcccgcctgctggcgaaccgtcttctggtgatgaaacaaggacaggtggtggaaagtggcttaaccgaccgggtgctcgacgatccgcatcatccttacacccagctactggtgtcgtcggtgttgcagaactaaccctcggtgccgttcccggcggcgcgttgctcggccgggaggcacgaaagctaatgaggctaaaaatgaacgctatacgcgttgaaaacatccataaaacctttgttctgcaccaacagcacggcgtacgcctgccggtgctcgccgatgcttcgctcaccgttaacgccggggagtgcgtggtgctgcacggccattccggcagcggtaaatcgacgctactgcgctcgctgtacgctaactatctgccggacagcggtcatattcatatccgccacggcgacgaatgggtggatctggtgaccgccacgccacgcaaggtgctggaagtgcgtaaaaccactatcggttgggttagccagtttctgcgggtgatcccgcggatatccgcactggaagtcgtcatgcagccactgctcgacctcggtacgccgcgcgaagagagcgccgctaaagccgcccgcctgctgacccagctcaacgtgccggagcgtctgtggcatctggcgccgtccaccttttccggcggcgaacagcagcgggtcaacatcgcccgcggttttgcggtcgactatccgattttactccttgatgaacccaccgcctcgctggatgccaacaacagcgctgcggtggtggcgctgatccagcaggcgaaagcgcgtggcgcagccatcgtcggtattttccatgatgaaacggtacgcggccaggtcgccgatcgcctgcacccaatgggtatcacagtatgataatcaataacgtaaagctggtactggaagacgagaccatcaatggttcactggaagtgcaggagggacgaatttacgcctttgccgaaagccagagccggctgcccggcgccctcgatggcgaaggcggctggctgctgccggggcttatcgaactccataccgataacctggataaattcttcaccccgcggccaaaggttgactggcccgcacactcggcgatgagcagccacgatgctttaatggtcgccagcggcatcaccaccgtactcgacgccgtggcgattggcgacgtgcgcgacggcggtgaccgccttgagaatctggaaaagatgatcaacgcggtggaagagacgcaaaaacgcgggcttaaccgcgccgagcaccgcctgcatctgcgctgtgaactgccgcaccataccaccttaccgctgtttgaaaagctggtcgaccgcgagccggtcactctggtgtcgctgatggaccactcgccgggtcaacgccagttcgccaaccgcgaaaaatatcgcgaatattatcagggcaaatatcagctcagcggcgagcagatgcaacgcttcgaagaagagcaaatggcgctggcggcggcctggtcgcagcctaatcgccaggctatcgccgcgatgtgccgggaacgccaaatcgccctcgccagccacgacgacgccactcatgaacatgtcgccgaatctcacctgcttggcagcgtgatcgccgaatttcccaccacgttggccgccgcgcaggcttcgcgccagcatggtatgaatgtgttgatgggggcgccgaatatcgtgcgcggcggctcgcattccggcaacgtcgccgcgcatcaactggccgccagcggcctgttggatattctctcttccgactactaccccgccagcctgcttgatgccgctttccgtattgcagatagcgacgacaacgctttcacgctggcgcaggctgtccgtctggtcagcaaacatcctgcgcaggcgctgggcctgcatgaccgcggcgtcatcgccgaaggcaaacgcgccgatctggtgctggcgcaccgccgcggcgagcacgtccatatcgaccacgtctggcgtcagggaaagagggtcttttaatgcctggaaaactgatttggctggtcggcccctcggggtcgggaaaggatagtctgctggccgcgctgcgccagcgtgagcatccgcaactgctggtcgcgcatcgctacatcacccgcccgcaccaggcgggctgcgagaaccatattgcgctcagcgagcatgagtttttcacccgcgccgagcgtaatcttttcgcgctaagctggcatgccaacaataattactatggcgtcggcgtggagatcgacctctggctgcatgccggttttgatgtcgtcgccaacggctcgcgcgcgcatctggcgcaggcgcgggaacgttacgatgacgtactggtaccgatttgtctcgaagtttcgccaacggtgttgcgccagcggcttgaacagcgcggtcgggaaaatgccgtggaaatcgcccaacgcctgcaacgcgccgcgcgctataaaccagccgattgcctgacgttgaataacgacggcagtctcgggcaatcggtagagcgtttcttccagctgttgcgccagcacgccgggcgtgaagagaatcagcatgcctgagggtaaggtaatacgatgagcctgacgatccgcctgaccggcaccggcggcgcccagcaggtgccggtcttcggctgcgactgcgccgcctgccagcgcgcccgcgtcgatgaacgctatcgccgccgcccctgcagcgcggtggtgcgctttaaccatgcggtcacgctgctcgacgccgggctggcggatctggcggaacgccagcccgctggcagcttccagcagattttattaacgcattaccatatggatcacgtgcaggggctgttcccctgcgctggggggtgggcgatccgattgcggtgtacggcccgccggatgacatcggctgcgacgatctgtttaaacatcccggcatcctcgattttagccacaccgttacccccttcacggtatttgaactacaggggctacaggtcacaccgctgccgttaatccactcgaagctgacctacggctatctgctggagtcggcgcacagccgggtggcctggcttgcggataccgccgggctgccggagaagacgctgaagtttttacttaataaccagccgcaggtaattatcatcgattgcagccacgagcccagaacagagacgccgcgcaaccacagcgacttgaataccgtgcgcgcgctgaatcaggtcctggactgtccacgggtgatcctcacccatatcagccatcagttcgaccgctggatgatagataacgcgctgccaaaaggtttcgaggcgggatacgacggcatggagatcgtgctggattagccggcattgtggccagggaaactcaataatcgtcgtcgaggcggcgctgatcgctttccaactggcggcgatcgctatcgagctgacgctggcgctcatccagctggcgacggcggtcgtcaagctggcgctggcgatcgttatattgctgctgattatccctacgctgctggcggctgccctgatagctgccgtcatcgtagcgtccgtcgtcatagcgtccgtcgtcgtcgtcggaacggctgctgcccggattgtaggcatcgttgatggcttgctgaatattaccaatagcatcgtcaataatatcggcgtgggccaattggctgctcagcgccagcgagcaaaaaaacagagcggttgcgtaacgtttcatcgtggccggtctcatcagggtactggtggtaccataatcaaccctatttgccgcgtgtagcggaggaatctcaaatccgcgcgattgccgcacgcaacgcctgcgccagctgcgtgcgggtaaaaggcttgcgcagccgttcaacctcaggcaacgccgggttatgcgcggggcgcaaatcctgaccgctaatcaatagcagcgccaccgccgggaaacggcgttgcgcttcgtgaatgacctcggcgccgctcagcccgccagggagcattaaatcgctaatcaacaacgcgatatccccggaggccgccagcatctgcagcgcttgctcgccgctttgtgcctccagcgtcatccagccaagctgatgcagctgctcgcataacgtctggcgcacatcggcttcatcctcaagcaccaacgccagccgctcgccgctcaccatcggttcgctaaccaacggcgttcgttcatcctccgccgctgccgtggctcgcggtagctgcaaacgtacggtggtgccctgccccggcgcgctttcaatcgccacgcgcccgcccgactggcgcacaaaaccgtacaccatcgatagcccaagcccgctgccgctaccggtctgtttggtggtaaagaagggctcgaagacctgcgcttttatctcctgcgacataccgcagccgtggtcaatcacctccagcgccaccatatcctgacgccgtccatcgctacgggtaacccgctggttccaggttcgtagcgcgatcgcacctggccgcccctccatggcgtcacgggcgttcatcaccaggttgataatcgcgttttccagttgcccgacatcgatccacgccggccaggcgggagactgcgcttcaatttcaagacgcaacgatgcggggagcgaatgacgcatcagctcgcagacgttctccagcaatggctgtagcgccaccgcctgcgggttcagcgcctgtttacgcgaaaaggccagcagccgctgagtaagtaaggcaccgcgttcggcagccttcagcgcccgcgatatccgcggcgcatcgcgctcatccggctgtaccagttccaggctgccgataataaccgccagcaggttgttaaaatcgtgtgccaggccgccggtaagctggccgacagctttcattttttggctatgcagcagcgcctcctccagcccctgtcgctcaatgcggtcaatttccatctgggtggttttctcccgcagcaggcgggtggtgtgctcaagggaagcggtattacgggcgaaaacgttaaaggcgcgcgccagttcgccaagctcatcgcgccgctgcagggccggcaccgtcacattctgctcgccgtgcgccagccgcgacatcgcgccggatatcgcgttcagattaaggccgagattacgatagatataccaacccgcgcagccggtaatcgccagcgccagcagcgcggccagcagaataaacgtgctgatggaacgcaactgctggtggctttgcgccgctcgcgcctcagatgcctgggcaactctggcaacatactgattaatatcatcattaagcagcgcaaccagcgctttaatatgaaacatataccagccgatcgccagatcgctctcttcaagctgcgccgatagcggcgccagtcgcgccagctcggcgttgaaatccggcaggataaacgccagcgcagaatcgctatcgttgcgcggtaaaaagcgtctgatgtcatcgagctgcaggacgatcgatcgcggcgtcgcagtatgtatcgcggcgacgatcagccggtccatttcgtttaagcgctgaggatcgatcggcggtttaccctcgcgatcgttaagatcctgcaaatgacgcaaatagctctggttttgatacagcgcgctcagcagttcattacgctgcagatggcggcgctgcccgcgctccagcatgccggcgacgctctgctgcagctcgttgctgcggcgaataatgctcgccaccagcgtctgttcctgccgcgccagcggcgccgaagccagttggctcagtgaatgcttcagcgcctgttgggtttccagcagccgttccgcttcgcttttatactccagcgcgcctactacttgcgacagccgcaccgctgcggtggcgacgttcgcggtatcacgcgccagattcatactgccgctcatgtcgctaagcgtttgcagctgcacctgctcctgcaactgactggcatggcgaaaaccgaaaatcgccaccccggcgaccattaacgtcaccgccaccatcaacaagttaaatgacagcaggcgaccgcgggcgctaacgaaaaagtacggatggcgagaagacatggcggctccggtcaggcgttttctcccatcattcccggactattgccgaaggtgaagaaaatttctcggcgtaattgtgatctgcattaactattcaaaaatatgacaattatgaatggccgatgacatcatccattcactccacgatgatgaagtgccgacatcgacaacgcagccaggagagcaggcatgcagggaacaccggtgctatccatgcgcaacatcgccaaagttttcggcaaattttatgcgctgaaaggggtggatctgacggtctggcccggcgagatccacgcgctgatgggcgaaaacggcgcgggaaaaagcacgctgatgaagatcctcgccggcgcctataccgcctccagcggcgagatcctgatcgacggaaaagcgcaaacgatcagaggccctaaggatgcgctggcggcggggatcacgctgatctatcaggagatgcagctggcgccgaatctcaccgtcgcggaaaacattttcctcggcagcgagctttcccgcggcggtctggtacagcgtaaagagatggagtcccaggcgcaggcggttatcgaccggctcggcgcgcagttcaaagccagcgaccgggtgatgaagctgactatcgccgaacagcagcaggtggaaatcgcccgcgcgctgcatcgcaacagccgcattctggtgatggatgaacctaccgccgccctctcctcgcgagaaacgcagcgcctgtttgagctaattttgcgactgcgcgatgaagggatggcaatcatctatatcagccaccgcatggccgaagtgtatgaactctccgaccgggtcagcgtgctgcgcgatggccagtatgtcggcagcctcacccgcgaccaccttagcgcccccgaattagtgcgcatgatggttggccgtccgctcagcgatctgttcaataaagagcgcgatattccgcgcggccagccgcgcctgcgggtgcaggatcttagcgacggcggcaaagtgcatcccagcagcctggtggtgcacgccggggaaatcgttggcctggccggactggtcggcgccgggcgttccgaactggcgcagctgattttcggcgtccgcaaagcgacgggcggggtgattgaaatcgacggcgaaccggtggttattcactcgccgcgcgaagctatcgacctcgggatcggctttctgaccgaaaaccgtaaggaacaggggctgtttctcgaactggcggcgcaggagaacatcaccatggcgacgcttgaacgcgacgccaattggggaatgctcgaccgtaagaaggcgcaaaccatctccgatgacgccatccagctgctgaacatccgcgtcccgcatgctcaggtacgcgccggcgggctttccggcggcaatcagcaaaagctgctgatttcacgctgggtggcgatcggcccgcgcattctcatcctggatgaaccgacccgcggcgttgacgtcggcgccaaaagcgagatttaccgcatcatgaatcagatggcccgccagggcgtcgccattttaatgatctccagcgaattgccggaaatcgtaggcatgagcgaccgggtatacgtgatgcgcgaaggcgctatcgccggcgagttgcaggttggcgagatcggtcaggaaagcattatgacgctggcgaccggcgtgaacgattctcaccttaaggcaggacaagcatgagcataccgaaagaaacctccgcgccggcggcgaaatccgcctcggcaaaaaaaatgctgatgggcgacctgatgcaaaccgtcggcatcctgccgattttaatcctgatcgtcgcggtgttcggcttcgtcgcgccgaatttcttcactgaaagcaacctgctgaatattacccgccagtcctccatcaacatcgtcctggcggcggggatgacctttattattcttaccggcggtatcgatctgtcggtggggtcaattctcggcaccaccgcggttgcggcgatggtggtatcgctcatcccgcaattcgcgatgctgtcgattccggcggccctgatgctcggcctgctgctcgggctgttcaacggcgcgctggtggccttcgccgggttaccgccgtttattgtcacccttggcacctacaccgcgctgcgcggcgccgcctatctgctggccgacggcaccacggtgattaactccgatattagttttgaatggatcggcaataactatctcggcccggtgccgtggctggtggtgatagcgctggcggtcgtggcggtatgctggtttatcctgcgccgcaccaccctcggtattcatatctacgccgtcggcggcaacatgcaggcggcgcggctgacgggaattaaagtctggctggtgctgctgttcgtctacggcatgagcggactgctttccgggctcggcggggtgatgagcgcctcccggctgtacagcgccaacggcaacctcggcgtcggctatgagctggacgccattgccgcggtgatcctcggcggcaccagtttcgtcggcggtatcggcaccatcaccggtacgctggtaggggcgctgattatcgccaccctcaacaacggcatgacgctgatgggcgtctcctacttctggcagttggtgatcaaaggggcggtgatcatcatagcggtgctgatcgacaaataccgtacccgacaccatcaaagtgcataacaacaacatcttacctgcgaggaaaagcgaatgcgtttaaaaccgatagtgaccgcgctgtgtgccggcgcgctgctggccgcctccccttttgcgtcggccaaagatttacaagcgataggtgtgacggtgggcgacctcgccaacccgttcttcgtgcaaatcaccaagggggccgaactggaagcgcgcaagctggcgggggataaagtgaaggttacgctggtgtccagcggatacgacctgggacagcaggtggcgcagatcgataactttatcgccgccaaagtcgatatgatcatcctcaacgccgctgattcaaaaggtatcggcccggcggtgaagcgggcgaaagaggccgggatcgtggtggtggcggttgacgtcgccgccgatggcgccgatgccaccatcacctccgataacacccaggccggcgcgatagcctgtaaatacattagcgaccgcctgaacaacaaaggcaacgtagtgattattaacgggccgccggtttccgcggtgcagaaccgcgtcgaaggctgcgaaaccgaattcaaaaaacatccggatatcaaaatcctctccgccaaccagaacgctaaaggtagccgcgaaggcgggctggaggtgatgacgtcgctgctggcggcgaatccgaagattgacggcgtgttcgcgattaacgatccgacggcgattggcgccgatctggcggcgaaacaggcacaacgcagcgaattctttatcgtgggcgtcgacggcagcccggacggcgaagaggcgctgaagcgtaagaattccctgttcgtcgccacgccagcgcaggacccgcaggtcatggcggcgaaggcggtagaaattggttatgacattctgcagggcaagcccgcgccagccgcgccggtgctgatcccggtgaagatgatcgataaaaataacgtcagcagctacaagggctggacggtgaaataaaaccgcaaagcggcgccgggcctcttttcgccctacgccgctttgtcgttatggataacgtcagcggcgaagacgtagcccagcccgcgcagggttttaatcaaggtgggttgatgcggattgacctcaactttacgccgcaggcgcattatcagcacatcgatcgtgcggtcgaatacctccatgctctcattatgggtcagcgccagcagctgttcacggttcagaacccggcgggcgttttgcgccaacgccagcaacaatccatactccccctgggttaacgccacgctctgctgctggggattaaacagctcacagcggcgggtatccagccgccagccgttaaataacaggccatgatctccgcccggcacgaggctttccgcgctgagcgccccgctgcgccgcagcaccgccttgacgcgcgccaccactacccgcgcgttaaacggtttggcgatgtaatcatcggcgcccatttccagcccgaccaccacatccgattcgcttcccaggccggaaagcattatcaccggcagctcaggccgcgtgcgttgtaactgttgtaacaccagcaatccattggtatccggtaggatcatatccagcagcgccagcgcgatatctgcgcgccgggcgaccgtcgccagcgcttcgccgccgttctggcaggccaccacctcgaacgcgtgggcgccgagcacgtcgctcagcagctcgcagatcgcggcgtcatcatcaatcaccaaaatgaccggtttcatggtttacctctgcctggcgggaatagtgtcagtctggtcgattgtgcaagcgggcgacgacaaatccatttttcgctgccgtttttataatcggcgtcacatctccaggcttttcgtcacgtcaaaactgacgatgacctgtttttcgtcagcatttcgcccaaaaaagccgcgtactatccgtcaatacccacaatgaaaacatggcatagaagatgcatagtgacggtcgattgcgcgtcagcgctaattgattaactggagcaaaaccgatgaaaaaagtcgtcacggtttgcccgtattgcgcatcaggttgcaaaatcaacctggtggtcgataacggcaaaatcgtccgggctgaggcggcgcaggggaaaaccaatcagggaaccctgtgtctgaaaggctattatggctgggacttcattaacgatacccagatcctgaccccgcgtctcaaaaccccatgatccgtcgccagcgtggcggcaaactggaagctgtctcctgggacgaggcgctcgattacgtcgccacccgccttggcgccattaaagaaaaatatggcccggacgcgatccagaccaccggctcctcccgcgggaccggtaatgaaaccaactacgtgatgcaaaaatttgcgcgcgccgttattggtaccaataacgtcgactgctgcgctcgcgtctgacacggcccttcggttgcaggtctgcaccagtcggtcggtaacggcgccatgagtaatgccatcacggagattgataacaccgacctggtgtttatcttcggttacaacccggcggattcccaccctatcgtggcgaatcacgtcattaacgccaaacgcaacggggcgaaaatcatcgtctgcgacccgcgcaagattgaaaccgcgcgcatcgccgacatgcacattgcgctgaagaacggctcgaatatcgcgctgctcaacgccattggccacgtcattattgaagaggatctgtacgataaatccttcgtcgccagccgttccgagggcttcgaggagtatcgcaaaatcgtcgaaggctatacgccggagtcggtggaagagataaccggcgtcagcgcccaggagatccgcgcctgcgcccggatgtacgccagcgccaaatccgccgccatcctgtggggcatgggcgtcacccagttctaccagggcgtggagaccgtgcggtcgctgaccagcctcgcgatcctcaccggcaacctcggcaagccgagcgtcggcgtcaacccggtgcgcgggcagaacaacgtccagggcgcctgcgatatgggcgcgctgccggatacctatccgggctaccagtacgttaagttcccggaaaatcgcgagaagttcgccagagcctggggcgtcgacagtctgccggaacataccggctatcgcatcagcgagctgccgcaccgtgccgaacacggtgaagtccgcgcggcgtacattatgggcgaggatccgctgcagaccgatgccgagctttccgcggtgcgcaaggcgtttgaacagctggaactggttatcgtccaggatattttcatgaccaaaaccgccgccgcggccgacgtcatcctgccgtccacctcgtggggcgagcacgaaggcgtttataccgcagcggaccgcggcttccagcgcttctttaaagcggtggagccgaagtgggacctgaaaaccgactggcagatcatcagcgaaatcgccacccggatgggctatccgatgcactacaacaacacccaggagatctgggatgagttgcggcatctgtgcccggacttctacggcgccacctatgaaaaaatgggcgagctcggctatgtcatgtggccatgccgcgacgagtccgacgccgaccaggggacgtcgtatctgtttaaagagaagttcgataccccgaacgggctggcgcagttcttcacctgcgactgggtcgcgccgatcgataagctcaccgacgagtatccgatggtgctctcaacggtgcgcgaggtcggccactactcctgccgttcgatgaccggcaactgcgcggcgctggcagcgctggcggatgaaccaggctatgcgcaaatcaacaccgccgacgccgaacggttaggcatcgaggatgacgcgctggtgtgggtcaattcgcgtaagggccgcatcatcacccgcgcgcaggtcagcgatcggccgaataaaggcgcggtgtacatgacctaccagtggtggatcggcgcctgtaacgagctggtgtcggagaacctgagtccgataaccaaaacgccggagtacaagtactgcgcggttaacgttgagcggattgccgatcaacgcgcggcggagcagtacgtaatcgacgagtacaacaagctgaaagcccgcctgcgcgaaagcgcgatgggttaaggttcagcggccatacccgatattcgggaaccctccccggtggcgcttacgtttaccggggcttccaaccgaatacagaaccgtagcccggataaggcgctatgcgccgctatccgggtattcaccccgctaattcccgccattttcttcttttccgccgccctttatactgcgggagtcttccttactgataataaaaaaatgaaatacctctatttactgctggcgctgacaagcttcgccgcagacgctgcggatccgggcagccaataccaacaacaggccgaagctggcgacccacgcgcgcagttttatctggcggatacctgggttagctccggcaactaccaacaggccgaatattgggcgcagaaagcggcggcgcagggcgatggcgacgcgatggcgctgctggctcagcttaaaatccgtaacccgcagcaggccgactatcaacaggcccgacagctagcggaaaaatccgtgcaggccggcagcaaggccggcgagattatcctcgcccgcgtactggtcaatcagcaggcaggccctaccgattatgcacacgccatcaggctgctgcaggatgcggccaaagatgaagagagcgactccgccgtcgatgcgcagatgctactggggcttatctacgccagcggggtgctggcgccggaagatgacctcaaggccgcgcaatacttcaaaggcagctcggcgctttcacgcaccggctatgccgaatactgggcagggatgatgttccagcagggagagaaaggttttatcgaaccaaacccgcaaaaagcgctgcactggcttaacgtcagctgtcaggaggggtttgataccggatgtgaagagttcgacaggataaccaaaggctaaaagaagcccggcgcgaatgaccgggctctgacatcttattgggcggttttatcaaacttgcccagcacttcgcgttcatacgccagcgctttcttgcgatcaaacttatgttcccacttggcgataaccagtaccgccagcgcgttgccgaccacgttcagcgcggtacgcgccatatcgaggatacggtcgacgccggcaataaacgccagcccttccagcgggatccccacgctacccagggtcgccagcagcaccacgaaggagacgcccggtacgcccgcgatgcctttagaggtcaccatcagcgtcagcacgagagtgatttcctgccacagggaaaggtcgataccgtacaactgggcgatgaagatcgccgcgatgctctgatatagcgtcgaacaatcgaggttaaaggagtagccggtcggcaccacgaagctggtgattgaggccggcgcgccgtaggcttccattttctcaatgatacgcggcagcacgctctcggagctcgccgttgagtaggccagaatcagctcgtctttaaggatacgaatcaggatccagatgctcagcccgcatacccgcgccacgatacccagcaccaccagcgcgaaaaacagaatcgcgaagtaaaccaggataaccagcttagccagcggccacagcgaagcgaagccgaaggtggcgacagtcaccgagatcagggcaaagaccccgaccggcgcatagcgcattaccatgtgcgtcactttgaacatggtttcagagatagaacggaaaacggtgaccagcggttcgcgatgggtcgccggcaatgaagagaggcccagaccgaacagcaccgagaagaagataatcggcagcatatcgcctttcgccatcgaggcgacgatattggtcggcaccagcgacaggatagtccccatcaggccatgagcgtggctctgcacttctgcggtggtgttctgatatttcgagatatcgaccgccgccagctgcgacatatcaatgccgctgcccggttggaagacgttcgccagggtgatccccagcacaatcgccaccgtggtgatcacttcaaaatagatgatggtcttagcgccgatgcggcccagttgcttggcgtcgcctacacccgcaatgcccaccaccagcgtcgagatgacaatcgggacgacaatcattttgatcaggtggataaagatatcgcctgccggggtcaggaggttagagattaaccaatcacggctttcggcgtggtaatgcaggtagctgcccagaagtatgccaagcaccagggctagcaaaatctgccaggccaggctgacttttgtttttttcatcactactgacttcctcaatgaaaggcgccattccgggaggtaatggcacccactgaaaggggtatgaattgtgttgcgttgctttatggggttatttaacgcgcaatatcagtatcatttgcacggcatgctgcgcaagcctttaagaacagcgctttcctctggttttctgcataaatccgctcatttcagcgcattacattgcataagtatttgttataaaaaatatttaacacattcagtttctataaatacagcaaatgaattatttcacttcaaagtttcatttggttgaatttcattcagtttaatcaatgcgtgatctgcccccaaatagtaaacaaagctcataaagcccctattcttaacggttatttgacatatatttaacaagttaaaggagaaaaaaagccatgagccaaatacataaacaccctattcccgcagagattgcggaacattgcctgatgaatccgcaacagtaccaggtgaactaccaacaatccattaccaaccccgatgccttctggggcgagcagggtaaaatcctcgattggattaaaccttacacacaggtgaaaaatacctctttcgcgccgggaaacatctccatcaaatggtatgaagatggcaccctgaacctcgcggccaactgtctcgaccgtcatctgcacgagcgcggcgaccagaccgcgatcatctgggaaggcgacgacgccagtcagagcaaaaatatcacttatcgccagcttcatcgcgatgtttgccgttttgccaacgtattgctcgatctgggcattaaaaaaggcgatgtcgttgcaatctatatgccgatggtgccggaagccgccgtggccatgttggcctgcgcgcgcatcggcgccatccattcggttatcttcggcggcttttcgccggaagcggttgccggacgcattatcgactccagcgctcgcctggtgatcacctctgacgaagggttacgcgccggtcgcgccatcccgctgaagaaaaacgtcgacgatgcgctgaaaaatccgcacgtcaccagcatcgagcatgtggtggtcctcaaacgcaccggcggcaaaatcgactggcaggaaggtcgcgatctgtggtggagcgatctgattgaaaaagcggatgaccaacatgaagcggtagaaatgaacgccgaagatccgctttttatcctctatacctccggttcgaccggcaagccgaaaggcgtgctacacaccaccggcggctatctggtgtatgcggcgaccaccttcaaatacgtctttgattatcatccgggcgatatctactggtgcaccgccgatgtgggctgggtcaccggtcacagctacctgctgtacggcccgctggcctgcggcgccaccacgctgatgttcgaaggcgtgccaaactggccgaccccggcgcgcatgtgccaggtggtggacaaacatcaggtcaatattctgtacaccgcgccaaccgcgatccgcgcgctgatggcggaaggcgacaaagctatcgaaggtaccgatcgttcctcactgcgcattctcggctcggtcggcgagccgattaacccggaagcctgggagtggtactggaagaagatcggcaacgaaaaatgcccggtgatggacacctggtggcagaccgaaaccggcggcttcatgatcaccccgctgccgggcgcgaccgaactgaaggccggttccgccacgcgtccattcttcggcgtccagccggtactggtggacaacgaagggacgccgctggaaggcgcgaccgagggcaatctggcgatcgccgactcctggcctggtcaggcgcgtaccctgtttggcgatcatgaacgcttcgagcagacctatttctcgacctttaaaaatatgtattttagcggcgacggcgcccgtcgcgacgaagatggttattactggatcaccggtcgcgtcgatgacgtactgaacgtctccggccaccgtctgggcaccgcggaaattgaatccgcgctggtctcgcatccgaaaatcgccgaagcagcggtggttggtattccgcataacatcaaaggccaagccatctacgcttacgtgacgctgaatcacggcgaagagccgacgccggagctgtatgccgaagtacgtaactgggtacgcaaagagattggcccgctggcgacgccggatgtactgcactggaccgactcgttgccgaaaacccgctccggcaaaatcatgcgccgtattctgcgtaagattgccgctggcgataccagtaatctcggggatacctcgacgctggccgatccgggcgtagtggacaaactgctcgaagagaagcaggccattgcgatgccttcttaatacgatacctaccccctctccctctctggagggagagattaaaaacataaactcccccaaggattctgttcagcaggaaagcggtaaaccagcggctactcgacgtaataacgtcgggcgggtcactgttgccgacggatagccgatggatgacataagggttacctctggagacgctaagatgaatgaacaaatttgtcagcggatagaaaatagtgcgcatttcagggagttagttgcatcacggcaacggtttgccgccactttatcaatcattatgttagtgatttacgtgggctttattttgcttatcgccttcgcgcctggctggcttggaacgccgctgcatgaaggcaccagcgtcacccgcggcatccctattggcatcggcgtcattatcatctccttcgttctgaccgggatttacgtctggcgggcaaacggcgaatacgacaagttgaccaaaagcgtgattagcgaggtgcaagcatcatgaaaaaagtcctgacggcgcttgccgccacgctccctttcgcggccaacgccgccgatgccattaccggcgcggtgcagcgtcagccgaccaactggcaggcgattatcatgttcgtgattttcgtcgccctgacgctgtacatcacttactgggcgtcaaaacgcgtacgttcgcgtagcgattactacacagctggcggcaatatcaccggtttccagaacggtctggcgatcgccggcgactttatgtccgcggcctcgtttctcggcatttcggcgctagtctatacctccggctacgacggtctgatctactcgctcggcttcctcgtcggctggccgattatcctgttcctgatcgccgaacgcttgcgtaacctcggccgctatacctttgccgacgtggcgtcttatcgcctgaagcaggggccgatccgcaccctatccgcctgcggttcgctggtggtggtggcgctgtatctgatcgcgcagatggttggcgccggtaagctcattcaactgctgttcggcctcaactatcacgtggcggtggtgctggtcggcgtgctgatggtgttgtacgtgctgttcggcggtatgctcgccaccacctgggtacagattatcaaagcggtcctgctgctgtttggcgccagctttatggcctttatggtgatgaagcacgtcggcttcagcttcaataatctgttcaccgaagcgatggcggtgcacccgaaaggggcggcaatcatgagccccggcgggctggtgaaagacccgatatcggcgctgtcgctcggtcttggcttaatgttcggtaccgcgggtctgccgcatattctgatgcgtttcttcaccgtgagcgacgccaaagaagcgcgtaagagcgtgttctacgccaccggtttcatgggctacttctatattcttacctttatcatcggcttcggtgccatcatgctggtgggagcgaatccggcgtttaaagacgccgctggacagcttatcggcggcaataatatggcggcggtgcatctggcggatgccgtcggcggtaatctgttccttggctttatctcggcggtggctttcgccacgatactggcagtggtcgccgggctgacgctggcgggagcatcggcggtctctcatgacctgtatgccaacgtctttaagaaaggggcaaccgaacgtgaagaactgaaagtgtcgaaaattaccgtgctgatcctgggcgtggtggcgattctgctgggtattttgttcgaaaaccagaatatcgccttcatggtcggcctggcgttctctatcgccgccagctgtaacttcccgattatcctgctgtcgatgtactggtcgaaactgaccacccgcggcgcgatgatcggcggctggctcggcctgctgaccgcggtgattttaatgatccttggcccgaccatttgggtgcagatcctcggacacgagaaagccatcttcccatacgaatacccggcgctgttctccatcgccatcgctttcatcggcatctggctgttctcgattaccgataactccgccgaagggatgcgcgagcgcgagcagttccgcgctcagtttatccgttcgcaaaccggtatcggtatcgaacgcggtcaggcgcactaagtgtatcagcctcttcctcgccttgaggaagaggctgtgttttagttataggtaaaggttatcaccccgctcgcatttgccggccccgccgtcacctcagcccccgtcttataatagttggcggaaaacgatagcgtctgcaaagggtttgcaccgcctgggctatcagggttggtaaagacggtataaccggcatccgcgtcgctattggtcaccgtcgtgcggcttgaagaatacaaactgatatccgtattcaacggtagcgcctcgccattcagattgagctggacgccaacaccggtggcgacattgctatctgctgtcagcgccatcaccgtgttatcaggattatcaccgcccgcttgtgccgccgtcacccgcatcgagacgttagtgcccggttcgcaggagagcgtgaccgactgccgagctgagcccactttcgtcgctgaattaaacgccgaagcgctgaccgtccccatctcgaagttcagccccgagctattggttacacagcccatcggggtcagttgaatcgtggtggtgccgctaatatgcagttgcgaaatcacgatagtgcctgtgctatctttcgcagaaaccgtagcgatcggatcggtcaaagacagtttactatttgtcgctattggaccgcctgtcgccactaactgcagctggtaagcgggtgaataactggttgaagcataataatccagtagcccggaaggtttaccaagatagtaattagcatcaccaataaaatgcgtctgatagtcactactgaaatcaccactatcgccgtcatattccccggtaatgtttagccagactttgactctcaatccaacgccttgtaacgaggtggtatagatattatccccgagtaaactacctgcattatttgaggcccactgaaagagagcgtagatatctccttcacaattagttagagcggttgacgaatgagttatttttcctgagtcatataatactgttccggctgagtaattcccggcactaactaaaatcttctcaggtaaattagtcatggatatatcaccgtaatttgccccgccacacccccagctaaactcagtaaacaggaacagagctagccagataaatttgttcatgcatcctcctgcatgtaatagttatttataggtgacatcaaaggtcgcggtaaatcccacaatgccagcactaatttttccgtagggtgaatacattctggcgatcatgttaaatgtatgagagccagcactatcatcaaacgtataaacataccgatcgttcggccctaatggctggttatccgcctggctaagcagttgcattccgacaccgctggccccatcactaccggtttgatagtttttataaattgaagcatgggcatcatcaaaatatgagccactgaaggataaggtgaccgtagagattcccgcggagcagttactaaactcaagcttaaccggcgtgctttccccactagaacccgctttaccggtaagcgtttgatacgacaccgtgcctagatcaatggtggtagagggttttatttcaacgttacaggatggctcctcaatgtttccggaaacattaaaattgagcgtacttgaatcctcataggcgaaaactggtggcgaaataacaaacaacccacagattaaataacctaataaacaaatcaagataccgccaatatttttaacatcacccattataaaaccccattgctttgagcaattgcataaattaatgacacagtgtttgataaaaaataatctcctgtttttttcctctacccgtcaaatcatagtttgcgcggcattgttcattgtctccctcaccccatttcaccagcatggttcctttttgctgaagccctgtcatataagcctgcccgtcatcaccaacaatattgctgcgaatatcctggcgccgttgcggctgattttctaaagtcacaatggcgccgaacggcgcgactccggtccgcgtctttaaagtgaccatcgctttcgctccaatataagtatcgtattgcactcttactatcgcgttgcgcgtcggtaccacgtttttcaccacattatcgatctccgcacctgcaatctgctgttcatccaatgacaggttattaatatggtacggccgaatatatggcacaattgcgtaacctgtggaatcggtagtgacattggtttgtccgcgtaccgccacattacccacaccgggcgtggcaatcagggcggaactctcgccgaggaatcgggaaagcgtgagtccaccggcgtgggcgatcatgccaccgcgtaatgaatagttataatggttgctataatggtcatagccgtaaccgccggaaatatcccctctggaactctgataatccacgccaatatttcctgaagtgcttttattactggcgttataaccttgctgaatattccagttaagcgatcgatccgccagcatcatgccgttcagtcctacgctgtgggtagtgtcgctggtacggccagaactcatgctgtagttagatgagagactctcgccgagcggcagagacagcgttaaagatacaagggtatcgctgtcaggtttagtctcggtactattttcgctactttgcacgtttcggttatatgagtaattaataaaatacgagacttttcccacagacccgctatagccaatacccagagactccattcgcgaactatcccagtaggtttcattgactaaagacagcgacagagaaccgtatccaaatagtgattgtgatattgaggcatcaaagcgcccttttttccgaccatttaaggtacaacaatcgcggtcatttgaggtattatcgataaaatcctgaaaggagtaatatcccgcagtagaatagcgataacccgcaaccgaaaaattagttcccgtccgtataaagttcttactaaagcgcagacgtaaggattgtccttttttttgcgacaatgtagaacgggtttcgttttgtttaatatctgccaatgactgagaagcgtcaaacgacaacgcgccaatactgcctaagttaaaaccagaacccattaatatattagtatatttatcttcagcctgttgcaatccagcatataacgtaatattgcttgaaacgccgtatgccgctgtcgactggataaaattatattctttatcgccagaactggtcgtgcgcgtttttccgctactaaaggcatagtccaactgcccctctcgctgcaaaatggcaagcgacgcataaggcacgataaaattttgctcactaccatcggactctttaatattaacgttgagatcgcctgcgctccccgttgaataaagatccttaatctcgaaggccccgggggcaaccgttgttttatagatactgtaaccattctgataaacggtgacctcggcggtagtacgcgctatacctttaatcgttggcgcgaaaccatgcagactgtccggcagcatttccttatccgagcttagttgcagaccagtaaaattcatactgtcatatatacctgatgaggtatacgtattacccagaacgaattggcttctcaaggtatgaatatcgcgagcaagatagctataaaccgattgccagtggctgccgtcatcgccatgatcaaacgtgctatagttgcgaagacgccacggccccagatttatgccaggctgcaaactcgcaaactgactttcggtggcgctaccgccgtgccgcggtgtattccattgccccgacaaactgtagttaagcaaacccgcgtttattccttgctgccactgttcttccggaacatagtctccagggcgattaagcaacgccgcctgcggcacggaaagtgcgaggcgctgctgcgataacgatacggagtattcaagaccaggaataacagacagacgggcacaatgcgttgccatatccgctaactgcggataacgctcggtattaatcgaccatgatcttaacagctcaacgtcaatgcagggttgaacctttatctgctggttatccgtgttttttttaaattcaacaacctcggaagatatatatttatcattaatataaatatccagattataactaccgggaggaatcgtatcctgagataaccaggataaatccacagcggtagcactactttcagtcacttccagtaaatgagggttgaagtattctccggctagcgcgccagaacttagggtagtaacgtatagcaaaaatgctactccgatataccctggagtctgaaaaagagtaatgctactgtatgattgcggaatattttttccctgccatgccataatcattaatcacgctccatgtgatttctttacttcccgcagaggataaaacagcttttgccggtatctttaacgtagaaaatggcgcaacgaaccatattccagatatattctgaccactaatctttatttgtgagaagttcatatacaatggtgaatgatttataacactataaaaattgctatcgcgacgccattgtaatttatccgcatagttttctggtatttggccctgtaattcttttggacgataaataagtttaattttagagttaatggcaaactgcaccgtatttttatctggcacattgtccatcgcgggtatgcctttaacatttaaccagagcatagactcgcgatctgttggcaatggtttccctgagcgcacgatccggacaaatcctttctctcccgaatttaatcgaaatagcggtggtgtgataataaaagcgtcttttactggcgatgacgtatcaacgacagaaagccaggactgaacaatattagtagtattatctttattatcaacaccgaccaccgtactctctttggcgccatcaaatatcacacgagtcgcgcccaccaccacgcttgcttgtgcattcgaaaaagttagcaataagctaataaagaataaacaatttctcatatatccctaataaaggggaatctacacccaactcccctttctccgtataaaataaattaatagtaagtcacgttataggtcactgtcgtatttaccgtacctttcgtaggatcagaagcgcctgacttgaccattttcacagtaaagggaatagttgctgccccggatgaaatatcaacatcggcaccttcttcgttatttttcagtagattaccctcgttatcaaaaatggcgaccgcaacgccggaagcagcagaactcgtggcctggtttttgaagtaatcactgttcgcagcatctgcctcgccaccgaaggtgatgcgggcgacagcgttgccccttcttcagtagtaggacagttagcgagtgaaaatgaaaaattcttcgccgcaccaaaggtattcgctttcaagtccgctactgaagtggtacccatttcgatagatgtcactccaccatcaattgttgcggtacaggtggtatcagaaacggtaccgttgaaagtgatagtattcgatgcagcttgtgtaaaagtcgacagcatgcaggaggcagaaattgccagcgcgcttaacgcatatttcttactaattttcatatgaattcccatatccattgtaaatgacaatcaatccgtcaattgcttcatgcaggtttattagagaatggaattcaatattcgcattacaaatttgccatgccaataatgataagagcaatttatttgatcacgtggtcactcattgaatccattcaataataatagcccacgtaaaaagaatatcgtgcagaatatatttttcaataagaagagctaacatcacttattagctgagattcatcatctgtcatcacacaatataaaaccataaacatcaaccaattagatacaccttcaaccataaagaaagttgatgcattttgatggattcggaataaagcctaaacagtttaaataccaattaagccaaacgtcttatatatacgtagtttcttaaatcattcaaatatcagcagccttacctgctgcacttcgaggtaaaactgctaaatattaaaatattgcccagcgtactagcggcgccgccagaaccattaccacgccggagagcatcattaccaggctggcgaccacgccctcctgctggcccagttcgtaggagcgggcagtaccggcgccgtgcgacgccgcgccgaaccctgcccctttcgccattccggcgctgatcgacaggcgtaagaacagcacgtcgccaatcgccatgccaaagactccggtaaccaccacaaacaacgccaccagatccggctggccgccgagcggttttgctgccgccagcgcaaacggcgtggtcaccgagcgtaccgccaggctacgctgaatttcatcagacagggtgaacagacgcgccagccagacggaagtggtcaccgccaccaccgaagccgtcacgacccccgcggtcaacgacatccagtgacgcttaataatcgccatgttgtcatagaccggtacggcgaaggcgatggtggccggccctaatagccacaatagccagtgcgactcgcccatatagctctggtaggaaatatggccaaagacgaggatcagcaccaacagtaccggcgtcagcaccagcggcatcaacggcagtttgtgaaagcggcgatagaggcgtttattggcgaaatagagcccgagggtaaccgccagacacagcatgctcagggtaaaatcactcatctttcaacctgctcacttcgtagcgataaaccttatccactacccatgccgtggcgcccagtaccatggtggtgcttagcgcgatgacgaggaagatgcgccagccgtctatcatcagcagttgcgcatagttaacgacggcaactaccgccgggacgaaaaacagcagcatctccgccagtagccagcgcgcgcctgcacgcacccagttcagcggtattacccggcagacaataagcatcaatagcatcaacatgccgacaagattggcaggaagcggtagatgtagccaattaaccagatattcagcgcagacaaataacccggcatagagcagtacctgaaccggtacctgaagacgttgcatcacgaaaggcgcaacacgtgctggcgcgaaggccatgagcggaattccctaaaaataagtcaggggtgcagtatagagagccgcccttgcggacagaaatgaattaaaatcatcacaggtatagtctcagggaataatcatggatatacgtacgttgcggtattttgtcgaagtcgtccgccagcaaagctttacccgcgcagcggagaagctcttcgtcacgcagcccaccatcagcaagatgctcaaaaatctggaagatgagctcaattgcaccctgcttatccgtgatggccgtaagctcttattaaccgataccggccgggtagtgttcgaacgcggccaggctatcctcggcgaattcagccagttaaaagccgagctcagcgatatcaaccatctgaataaaggcgtgctgcgcctggggatcccgccgatggtcggcatgctgatggccgagcccatcagccgctatcgccttcgttatcccggcgtggagctgaaaatttccgagtttggcggattgacggtgcagcaggcggttagcaacggcgaactcgatctggcgatgaccgcgctaccggtcgatgaggccagcggtctgaccacgctgtcgctctttagccatccgctctgcgtcctcgtaccgaagacggcgcagtggcagggtatcacctcgatctcgccgcaaaagctggcgcagcatccgttggttatctacaacgaagatttcgcccttagccagcaactgatgcgactgtttgccgagcatgacgtgaagccgcgtatcgccgtgcgcagcggccagtgggattttctggcggcgatggtgcaggcgggcattggcgtggcgattttgccggagccgatttgccagcgtcttgacgccgaggatttttattggatcccgctggagtgccaattacgttgggaattagggatgatctggcgggaaggggtgtatatgtcgcgcagcgcccaggcgtggctggagtgcagtaaaacgttctggctggagtaattccccggtcgcgctaacgcttaccggggctacataaataccgtaggtcgggtaaggcgttagccgccacccgacaaaaacggcaccgcgagtagcccggataagcgtaacgctatccggggctaaggttactgatcttcgattaacagcgcttctaacaggtcgagatcgtgtagcagtttctgcaacgtctcgttgctgatttgccgcgtcgcgcgcaggtggtacagctcaccacgttccgaacgcagcgccgccagacggaaacggcgctcaaggctctcttccagcatcgaggtttcgacatcgttacgcccatccacacggcgacgcaaattaccgatgacacgcgaactcacctcggtcagcagctggttgtcgatattctctttggtatccgccgccaggcgttcttccattttctgaatcgcgacaatcgccacatccgccgtcgcggcgcgcgccagacgctcttctttgcgctgctgtacgtggtcggtggactcaatacgccgcagcaggatcggcagcgcaatgaccccgacaaacagggagaaaagaatcaccccagcggcaaggaaaataagctcgtaacgcgccgggaagacgttgccgtccggcagcagtagcggaatcgatagcacaccggcgagggtaatcgccccgcgcaccccggcgacggaggagatcagcagctcgcgggtggtccaggagccaaactccatcggtttcttcttcaggaagcgctggctaagcttacgcatcgtccacagccagccaaaacgcaccagcatcagcgccgcgtaaatcagcacgatatcggtgaacagcatccaggtttcaacgttcggatcggcttcggccgccaccagcgaactcgacaggatatcgggtagctgcaggcccaacagcaggaacaccatgccgttaaacacgaattccagcattgcccaggtgctgttggcgcgcaggcgcatagccaacggcgcggtacgcatcaccccggaacgggtgatggtcatccccgctgccaccgccgccaggatcccgagaaaccgatatgttcggcaatcaggtaggaagcgaacggcagcaggaacagcagcacaatttgcgtcgccggttcatcaccgccccaacggctgaggaaacgcattgagcggccatacaaccaactgaccacaaaaccagccaggatgccgccaatcgctaccttcagaaactcaacggttgcgccgccaatggtgaacaccatcgtgcccatcgccacggcaacggcaaattttaacgacaccagaccagaggcgtcgttcatcagcgcttcgccctgcagaatgcccatgattttcttcggtatccgcccttcgccgacaataccggacagcgccacggcatcggtcggcgacagcaccgccgcaagggcgaacgccggaaccagcgggatccccggcacaatccagtaaatcaggaagccgataccgaccacggtaaccaccaccagcgccagcgccaggccgaagatttcccgcccgtgctcgataaattcgcgggtcggcgttttccagccatcggcaaatagcagcggcggaataaacagaacgaggaagagttcagggtcgaactcgacgtgcaaaccaaaggttggccaggctaacagcgcgccgatggcgatttgcattaacggtagtggaacctgaaagggcagtacgcgtgtaaccaccccggagagtgagaccacaagggtcatgatgagtatggtgaagaatatttccatgtgttccctgtttgctgcgttttctttttttacatctgaggcgtcatgtctcgaaatgatacgctactcagattaacgcaaaaggaaacaggatgtggcttaaaaattaaacgggcggccaaggccgcccgtcgttagcaggaaaagttaaatcgcccacccaccggcatagaagataaccagcgccgccgcgatgatgatggtgcccgcattgagcttacgccactcgccggataccacgcggccaatcaccagcgacgcaaaaccgatcataatgccggtcacgatgttgcaggttagcacgataaacaccgcggtaatcagccccgccatcgcgtcaacgaagtcattgaagtcgattttcgctacgttgctcaacatcagcaggccaacatacatcagcgctggcgcggtcgcgtaggccggaaccaaataggagagcggagaaaggaacaggatcagcaggaacagtacgccaacggtgactgccgtcaggccggttttaccgcccgccgccgtaccagctgccgattcgatatacaccgccgcaggagctgcgcccactacgccggagaacacgctgctcagggagtcggtagtcagcgctttgccgccgttgatgatctgcccgtctttatccagcagattagcctggccggcaaccgcgcgaatggtgccggtagcatcgaatactgcagtcatgaccagcgccagcacgcttggtaacaccaccgggttcagcgcgccgatgatatcaaggctgccaatcagcgaattacctttgtcatcgctcagcgacggcatggcgaaaatcccggagaaatggacgttcggatcgaaaatcaggccgataatggaaataccgatgatggtcagcagaatgccgcccggcactttcagtttttccagcccgataatgaccgccaggccaatcagcgacatcatcaccgggaaactgtcgaagttgcccagagcaaccggcagaccgtccagcggatttttaatcaccaggccgacgccgttggcggcaatcagcagcaggaacaggccgataccgatgccggtgccgtgcgccacaccctgcggcaggttgcgcaggatccagctacgaataccggtagcggagataatggtgaacaatacccccatcaggaaaacggcgcctaatgctactggaatgctgatgtgctgccccagcaccaggctaaaagcggtaaacgcggtcagcgaaatcgcgcaaccaatagccagcggcaggttggcccacagacccatgactaatgaaccgacgcccgctaccaggcaggtcgatacgaacaccgcagcaggcggaaagccagctttccctaacattcccggcactacgatgacggagtacaccatcgccaggaaggtagttaatccggcaacaatttcctgacgtacggagctgccgcgagctgaaattttaaaccaggcgtctaaagaaccaccggtacgcgctgaaggcgtagacatagaaaacttcccctgaaaattttgatcgttcgcttgcatgcgtgatggaccgtccactgccagttaaacgccatctccttgtgctgtttcccggcgccaggagggaggctgagaaaaagcaaacgtttaactccgcgcatacaatgcggtatatggaatgtctttgctcccctgtcggcaggggaaaaaacgagcaaagtaaaaaggcaaacgattatcctgtctttagctggcccttttcaactgaagtttgtcgtattttgccaaatttcgccgctaaagctcaggaaatagacaaacgatgcgcaaacgttatcgtcagtgcgcaatgcattaacatttttatatgttttaatccgctttcaggcgtattaaccgccaggtagggtaaatggcccgccgcgctcaatagcgttaatccatcccggacgtgactccacctgctgctgccagcgccgggtatgcggcaagccttcaatgccgccccgcgccagtagcgccattaccggaaagctcatctgaatatccgccatactcaacgcactgccagcaaaccacggctgacgggccagatgttgttctatataagccgcatgggtcgccaactgcctgtccagccacgctttttgcacccctttgcccaacgccccgcccagcgtgcgcatgccaagcggtaccggcggcttgccgaggctggcaaagacaagcttcatcaacagtaagggcattaacgatccttcggcataatggagccagaaacgatattgcagtttatcttcccgccccagcggtctgagctgctgggcgctatcgtaggtctcctgcagatattccagaatcgcgccggactccgccagtactacgccctgatcctcaagcaccggcgatttacccaacgggtgaatttttttcagttccgctggcgcctgcatgtttttttcacgctggtagcagacgatctgataggacaattgcagttcttccaacgcccacagcacgcgctgcgagcgggattggttgaggtgatggaccgtcaacatggcgctctcctgttgttcgttcaaattaactatagaaacaggcggccaatgacggaaaaatttcggcaacgccaacaggcaaaatcagcaggctgtgccacaattacattgtcgacgcaatccggaacctccttcaacacattgcgcaatacctgaggggagtcgacgtcgggggaaaccctcccgtgagccagcgggataatgcgaaagacaaagaccggaaaacaactaaagcgccctgttgtggcgctttagttttttgcaggcatcaccattaatcctcttccagcagacgtgcgccggtcccctcttcacccaacttatctccagggttgcgtaacggacaatcgcggcgcgataagcagccgcagccgatgcagccgtcgagttggtcgcgcaacgcggtcagggtgtgaatacgccggtccagctcctcccgccattgcgacgacagctgtttccactctttggcgctcagattatgcccttccggcaggacgccgaatgcctcgccgatggtcgccagcggaataccaatacgttgcgcaatcttgatgatagcgaccgcacgcagcacatcgcggcgatatcgccgctgattgcccgcgttgcgctggctgcggataagccctttgctttcataaaagtgcagcgccgagacggcgacgccggttcgtttcgccacttctccaggggagagcagcattttgatacgggttggtttcttttccataaaagcgctttacctcaagttaacttgaggaattatactcgccagcagacaaaacgacgaatcgagaattgagagaggccgctttatgtcccatcaggatattatccaaacgcttattgaatggattgatgaacatatcgatcaaccacttaacattgatgtagtcgctaaaaaatcgggatactcgaaatggtatctgcagcggatgttccgtaccgtcacccaccaaacgctgggtgattacattcgccagcgccggctactgctcgccgctgaggcgctaagaaccacgcaacgccctatttttgatattgcgatggatttgggatacgtctcgcagcagacgttctcgcgggtgttccgccgggagttcgatcgtactcccagcgactaccgtcatcagatttccgcctgacgaccgtcgtgcggcgtacgcagtaagatcggagacttggcaagccactgcataaattcctgcggcggcattgccctggcaaaatgccatccctgacaaaactgcacgccgcgcttaagtaaccaatccacctgatccagcgtttcgaccccttcggcgatggtttttaaacgcaggctacgcgccatatcgatgatatgttcggcaatcagatggctggtgctattggtcgtcaacgtatcgataaaggatttatcaatcttcagaatatcgacattgagcgaatagagattgtgcaggttggaataaccggtgccgaaatcatcaatagctatctcgtagcccgcctcgcggaaggcctgaatcaccggcgtggttttcggcacatcaataaagcccctttcagtgacttcaatttttatttgcttcacgcaaaccgcataactgcgcgctttctcagtgatctgcgcaatcaacctcgcggagtggaaatccgaggccgaaagattaatcgcgatatagagatgcggatgtctggacaaatattcgccaagatcgttgaacaactcgtcaactacgtaatccgtcacctgagcaatcatgcctgagttttccgccaatggaataaactccgccgggctcatgaccggaccgtcaaatcccggccagcgtagcaacgcctcggcgccgacgcagcggttatttttgatgtcaataataggttggtaatgcaggcatagctggcggtggcttaacgcccgcaagagcttatttcggggtgaatgatactgctgacggctgcgcgaccacaccatcataatcaatatgctgcagatgatccctaacggcagagtcagagtgacctgatcgtacaggctggcataatagctggcgcgcgaggtggacatgataaccgcaatcggccgaatcgaggaatgagcgacggtatacacccgaccatcctgattaaaaaaagcatcttcgtggcggataaggcggtgtagttccctggcatcaacgtttttactcactgagaaaaacatattcgttttggtatcgaagacgccgtaggccaagtctctatcactggaaatgaccgagctataagagagaggatttaccaccacggcataatgtccgcgctgcatataattcatgtcatagcccggataaaacggtgtatcgcggtagtagtaaatggagacgtcgggctgacgggtgtaattcgctgcggctattctccatccctcttcgggatgaactgcagtagaacagatgaatttgttaccgttcgcgtaaatcaagtcatcgacatacagtaatccgcggacaatattcaacatgtaatgctgatgctgcggtgaacacattgtccctgaaaactgcatggccttttcgcgcgcctgctcggattcatgaatgaccatctccgttttttgcagcgccagctgcgaaaacgactgcaatctatcggatatttcttcccgggctctaatttgcgcgaaccacaacgccaacaccaccggcagcactaccaccagtatggtgaagaatattctgaacgccttatgcggcgcgctacgactcatttccgctttttatccatgcgatacgcctcaatcacggtataagggcaaaaaccaggcattaccgactgttataaaaaacagcgaatttcagcaacgaacacgtttatgtaaaaacctcacacctaataatgatgaatgatacttacttatagatggatcgagaaacactctcgtaataattaagacactagctacttactaattcggtttctccgtacaattactcgtaataagtaacaaaacccgcacaacgattatcggcagcacctgttcagtccttagcggcagcgaaaaacagccaccagacaagctggcgcgcattccctcggcattaaccttatttattttgtggttttaaagtgtcaaaaaaggtcattttttgtctggcgaataaatcatcaaatgtgatatggttcacacaagttgatgaaacaaaactgtcgtttcattactccctgaagtgcccccagatagccagagcgtctcattagttgataatcgcgccaggttgtctaaggctcccgactttcattgagagataggataagttaatggcttccattactaccagtgtcgtacttttacgctggcccctggtgagcgcggtattgatgttcctggccagctcgctgaatattcaattacgtaaaagcgactatgccggcttagcgattatttgtagctgtctgggccttgctgccgcctgctggtttgctaccggcttgttaggcatcaccatggtggatgtcgccaaaatctggggcaacattaaagacgtgatggttgaagtcatgagtcagacgccaccagaatggccaatgatgatgacctgataaaaaagcttcctgcgggaagcttttttattttcagcaacagtgagggtctttcctactccccggctaatattgctcgcataactgcggtcgtagtcgctcgtttgggcagcgcttaaccgcacaatacgattgataaagacaagatgccggttccgcggcgtcgaaattgtacggacaggttggccgctctcttaacgtttcccactgtttatcgtcataacgagtaatgttgtaaacttttaatgaatgatattgatcattaattaaaactttagatgaataaagtttcattgtttcaccgggaagcaataaaagatcggcttcataccagataataaacttcaaaaacctcagccccgatattgacgagaatgcaacgccggtatgcgggcagataagggtgttaagaattgtccatttcatcatccatccttataagtaaaatctgtactgggaatttagtgatagcactccagaccgttatctgcaaggcagcttattaagagtgtgatatgagacgataccgatacaggtcgacgatacccctcatgaggtaagctaatctgggatttctacgaattatgtattaatactaaaagtacataaccatgcagagactataaataaccttacattagattttaaataacagacaaaaatatcattttgatagtcaccagggtgtaaaaacaattagcgatcacatatagaaaatattttacagtgagataagcacctccttcttttgtattaaagcgcatacggtaatacctccccgctgtactggcacaatggaggcaagcagaaaaaggcgtaggagagcgcttgtattgtctaaaatataaccatatccctgcagagtgtcgcatcatgaacatcttcggttttcagcgtcgtctgccgacgctttccggctgccttctcaccctcctgtttgccgtctcaaccccagcagcttcgacggaaaaaccgccgccgttgcaaaatgacaaagctgagctggctatcaatatggatcacatcatgcaaccgcaaaaaggcgatcttcccgatatgatcaatcggcgggcgatccgggtgctaacgacttacagcaaaacgttcttttttatcgacaaggggacccaacgcggcgctacccacgatcttttcatcgctttagaaaaagatctcaacaatcagctcgcaaaagagaagaagctgaagcagaaacacctcaaagtgcggatcgttttcatcccggtcacgcgggataacctgttcaaagcgctaaatgaaggcaagggggatatcgccgccgccaatctcacgattacctcgtcgcgtcaggagcaggtcgcctttaccaccccgctctatagcgatgtcaaagaactgttggtatcggggccatcatcgcccgacgtgaaaaacctggagcagctttccggtaaaaccgtgtttgtccgccgctcctccagctattacgaaagtttgcagagacttaacgccagcttcgctaaagcgtcgctgccgccggttattctgcaggaagcgccagaggcgctcgaagatgaggatcttctcgaaatgctcaatgccggcctgattccctgatcgtagtggatcgccataaggcgcttttctggaaacaggtatttccaaaaattcaggtgcatgacgacattgtattacgggatggcggtagcatcgcctgggcggtccgcaaagataaccctcagcttctcgcggtactgaataatttcgtgaaaaataatcgtcaaggcagcaccctgggaaacatgattctgctgcgctacctgaaaagcgcgacctacgttaaaaacgccgcagccaacagagagcgcgctaagtttttgcagatggtggacatttttagaaaatatggcgaacgctatgatgtcgactggctgctgatggccgcccagggatatcaggaatcgcggctcaatcaatcggtacgcagccacgtcggcgcaatcggcgtgatgcaggtcatgcccgcaaccggcaaggaattgcaggtcggcgatatcaaaaaaatcgaccccaacattcatgccggcgttaagtatatgcgctggatgatcgatcattactatggcgaccaaccgatgacgccgcttgataaggcgctgttttcgtttgcttcttacaatgccggcccggcacgcatcgcgcgtctacgtacggaaacccaaaaacgcggatttgacccgaatatctggtttggcaacgtcgagaatctcgcagcagagaagatcggcgctgagacggtgacctatgtcagcaacatctataaatactacattgcctatcggctgattatggatgatatcgcccgcaaacaaaaagcgaccgccgcgccgctacccgagcctggaacgggtaagccgcagcccgacgcggctacgcccacaacgcctcaaattccgacgccggcggcctgagagcctgaaatgaaaaagccccgaacactcggggctttttgttggcttaccgcacaggcagcacgtaataaggaaaaccttagaacggaatatcgtcgtcgaagtccattggcggttcgttagatggcgctgccggggcctgctgctgcggacgagactgcgcgccgccgctgaactggttaccgccctgcggctgctgaggctgaccccaaccgccctgctgctggccgccgcctgccggtgcgccgccgccctgacggccgcccagcatctgcatggtgccgccgacgtttaccacgatttcagtggtgtatttgtcctgaccggactgatcggtccatttacgggtgcgcagctggccttcgatataaacctgagaacctttacgcaggtattcgccagcgacttccgccagtttgccgaacagcacaacgcggtgccattcagtctgctctttcatttcgccggtttgcttatcgcgccaggattcggaagttgccagcgtgaagttggcgacagcgccgccacttggcatgtagcgtacttccgggtcctgccccagattaccgacgagaatcaccttgtttacgcctctgctggccatgatcgaatctcctgaataatacgttttgtataagtgtaaaccgggaattctaacaccacaaaggggcaatttgatagctgcgaagccaattccagaaaacatcccgccgctatgcaaattttcaccctcttactgcagcgccattccaatactgtatatccagacaggttaaattgtgtcataattagccgtttctgccgtttgtcctttaagcaaaccaggcaatccgtgtatctacctaccgggaaaggtgaatggataagatcgaagttcggggcgcccgcacccataatctcaaaaacatcaacctcgtcatcccgcgcgacaaactcattgtcgtcaccgggctttctgggtctggcaaatcctcactcgctttcgacaccctgtacgccgaaggccagcgtcgctacgtcgaatcgctctccgcctatgcgcgacagttcctgtcgctgatggagaaaccggacgtcgatcatatcgaagggctgtcgccggcgatttctatcgaacagaaatcgacctcccacaacccgcgttcgacggtaggcaccattactgaaatccacgactatctgcgactgctgtacgcccgcgtcggtgaaccgcgttgtccggaccacgacgtccctctggccgcgcaaaccgtcagccagatggtcgataacgtgctctctcagccggaaggtcagcgcctgatgctgctggcgccgattattaaagagcgtaagggcgagcacaccaaaacgctggaaaaccttgccagccagggctacattcgcgcgcggatcgatggtgaagtctgcgatctttcggatccgccgaaattagaactgcaaaagaaacacacgatcgaagtggttatcgatcgcttcaaagtacgtgacgatctggcgcaacgtctggccgaatctttcgaaaccgcgctggagctctccggcggcaccgccattgtttccaatatggatgacagtaaagcggaagaactactgttctcggcgaacttcgcttgcccgatttgcggctatagcatgcgcgaactggagccgcgtctgttctccttcaacaacccggcaggggcctgtccaacctgcgacggccttggcgttcaacagtatttcgatcccgaccgcgtagttcagaacccggagctctcgctggctggcggcgccatccgcggctgggatcgccgcaacttctactacttccagatgctgaagtcgctggcggatcactataagtttgatgtcgaagcgccctggggcaccctcagcgctaatgtgcagaaagtcgtgctgtacggttcaggtaaagagaatattgaattcaaatacatgaacgaccgcggcgacacgtcagtacgccgtcacccgttcgaaggcgtgctgcacaacatggagcgccgttataaagagacggaatccagcgcggtgcgcgaagagctggcgaaattcatcagcaaccgtccgtgcgccagctgcgagggtacgcgtctgcgccgcgaagcgcgtcacgtgtttgtggagaacacgccgctgccgaccatttccgatatgagcatcggccacgcgatggacttcttcaacaacctgaagctgtccggacagcgggcgcaaatcgccgagaaagtgctgaaagagattggcgatcgcctgaagtttctcgtcaacgtcggtctgaactacctgacgctctctcgttcggcggagacgctctccggcggtgaagcgcagcgtattcgtctggcgagccagattggagcggggctggttggcgtgatgtacgtactggatgagccctccatcggcctgcaccagcgtgataacgaacgtctgctcggtacgcttatccacctgcgtaacctcggtaacacggtcattgtcgttgagcatgacgaagacgcaattcgcgccgccgaccatgtgatcgacatcggccccggcgctggggttcacggcggccaggtggtggccgaagggcctctggacgccattatggcggtaccggaatccctcaccgggcagtacatgagcggtaaacgcaaaatcgaagtgccgaaacagcgcgtcgccgccgatccggaaaaagtgctgaagctcaccggcgcgcgcggcaacaacctcaaggatgtgacgctgacgctgccggtcggcctgtttacctgtatcactggcgtttccggttccggtaaatcaacgctgattaacgatactctgttccccatcgcccagcgccagttgaacggcgcgacgattgccgagcctgcgccgtatcgcgatgttcaggggctggagcacttcgataaagtcattgatatcgaccagagcccgattggccgcacgccacgctcaaacccggcaacctataccggcgtcttcacgccggtgcgcgaactgttcgccggagtaccggaatcacgttcacgcggctatacgccgggccgcttcagttttaacgtccgcggtggccgctgcgaagcctgtcagggcgacggagtgatcaaggttgagatgcacttcctgccggatatctacgtgccgtgcgaccagtgcaaaggcaaacgctataatcgcgaaacgctggagattaagtacaaaggcaaaactatccacgaagtgctggatatgaccatcgaagaagcgcgcgaattctttgatgccgttccggcgctggcgcgcaagctgcaaaccctgatggatgttggcctgacctatattcgtctcggccagtcggcgaccacgctctccggcggtgaagcccagcgtgtgaagctagcgcgcgaactctccaaacgcggaaccggccagacgctgtatatccttgatgagccgactaccggcctgcatttcgccgatattcagcagttgctggacgtactgcatcagctacgcgatcagggcaataccatcgtggtcattgagcacaacctcgacgtgattaaaaccgccgactggattgtcgacctcggcccggaaggcggtagcggcggcggggaaattctcgtttccggcacgccggaaaccgttgttgaatgtgaagcctcgcacacggcgcgcttcctgaagcccttgctgaagtaacctctcaggcctcttccttcgtggaagaggcctcatttcatctcatttcatctcatttttttacgctgagacttcgtgatttgcccggtgcgctcactctggcgtctgatagtcgctatcgtccaccgatgccgggaaaactatgcgagtaccacgcctcattccgttatttgttatcgccgccgcgctatgtgtattaagcgcctgctcatgggttggccgctacagcgatacggcctatcagcaattgctcacactcaagcagttgcatttgcagttcatcgccaccgcagcgacggaggacgatcaacaattgagcgaggaagatgaacagattcgccagcagtttgcgcaggcaatcgcccaaggcgacgcgctgcgtcaggaaaatttcaagctacttgaaggtaactatctgcgcatatacgcccatcgccagatgcggggcgcgccctttacccctgccgaagcgcaatatttaacgcggcagaccatttatctttatcaacaggctatcgctggcgaatgtcagcgtacagggagggaataatgccgacaaccatggagattcgcacgctgttgtccgcttgcgcgattaatagcgccgaatggatgccattactgaataaagtacttggcgatgagcagcgcgaagtacgcgatagcgccatctttttgctacaggcattgcagcaaaaagctcagggctggctgaacgaagacgatctacggctactgctggaaggtcagcgcgatattgcccgcattcgcgccaacaaccagagcatcgcacgccaggcgcagctgcagtcaacgttgttacggctgttcgatatcacgctactggcgctggcaggcaggctataagctaggccaactgccgccgcttatcctccgacagcaggtcgaccgcctgttggtaggaggcatccaccaggtagtaaatctgcgagtctggcagagagccatcaaggaaaaccgtgctccagtgagctttattcaggtgcctgctggggcgaacatcacgatgttgttcgcgcagcagatcggcaagctccgggctggtctttaacgcaacggccggccgcttatcctccacctctttcaccatggcgaataacacatccgcgaccttgatttgcgtcgctttccagtcgctatgaacactttgctccgcgcctggcttcgccatgcagtactgcagtagatccgatatggtcattttttattctcccatgagcgttgcgacgatatgccgcgaaccgccgtgaatacgatgctccccagccagatcccctgccaggtccctaacatgatgttgccgttctgcaccggcagcatcagagaaacgcccagcagcgatgatttaatgtgcgagggcatatcatcaggaccttcataatcgtgttcatacggcgcgttgtctggtacggcgttgagaaaatgctgttccatatcaaaacggaccgtcggatcgcagttctcattcaacgtcagggaagcggaagtatgctggagtaacagatgcagcaggccaaccttgatatgcgagagttcgcggatttgaccaataatttcattggtcaccagatggaaaccacgagatttcgggcctaatgtcagggtttgctgatgccacataaacgactcctgtaatgtgtgaatccttctaagtttgcagcaagaagcgaaaaggtaaaacctcaaacgctgaaattcgtacaaaaaaagacagcctacggctgcccttttcgtgttcagaagcgtcgtgtttcgcacgacttaatattctgaattcacaataacctcttctccttgcgacccggccatcggcagtggtttgtaggaggagtttgccgcgcgcagtacgcgaattccgcgcgcatcggcatcgcgagccgccgagatgtcgttgtcagagtcaccgtagaagactttgatattcttctcccgtaaccactgggttttagtgttctggccgggcttatcaccggcaaaaatcactgggttcatgttagcgccggggatcaggaaatcatcctgcagggttttggagacggtctcagttttggtctggctgcggccggtgacgaagtagatgctgtcgccgcgcttaatatgcatcgcgatcagctggcggcccacttctttcggcatactgaactcatcccagccgttattcatcttttcccagaactcgggattcttcagataggcttcgctgccgggagaataggttttttgcccgcgccagaaaccagggctggaaaacagcacggtatcatcgatatcgaaacccaccgccatcggcgcgcggcccagcaggctattttcgatttgtgctaccgatacccaatggatcggcgcctgttcggcgagtttcgcaacattcgtcccttcccaaatgggctgtggtgtggacgcgcgagcgacaacggagctattcagagcgaacaacagacaagtggcgctaatggccaaagttaacttacgcatatttatccctatgccctcatgcgccaggccgcttagcggcaacctgagttattttgggtctaaataatcgattcgttattatttttaataatgagtgagcgtattaatgcaccaagaccttaacgcctgcccacacagatagaaaggattttctgctcagatgtcatataaaaagagcatgatcacacttcagaggtaatactaccctcgccttaacgctggcgagggtaagttagtaagtaagcacttacattacggcagcaaacgcctgagcgacgcgctggacgttacgcgagttaagtcccgccacgcacatccggccgctggcaatcaggtaaacgccaaactcttcgcgtagacgatccacctgtgccgcgctcaatccggtgtagctaaacatgccgcgctgcttcagcaggtagtcaaagttttttccgggaacggcctctttcagcgcatccaccagcgtctgacgcatcgccaggatgcgggtacgcatagcttccacttccgccagccatgaggctttcagcgccgggtcgttcaatactgccgcaaccacctgcgcgccaaaattcggcgggctggagtagttacgacgcaccgtcgctttcaactggcccagtacgcggcctgccgtttctgcatcatcgcagacaattgacaggccgccgacgcgttcgccgtacaacgaaaagattttggagaatgagttgctaaccagcatcggcaagccggcgctggcaatcgcgcggatagcgtaggcatcgtcttccatgccggcgccaaagccctgataggcgatatcgaggaaaggaattaagttacgtgctttcaacaccttaacgacttcatcccactgtgcgttgctcaggtcggcacccgttgggttgtggcaacatggatgcagcagcacgatatcgcgctcagggagcgtctgtagtctggcgaggaaggcttcaaaacgcacgccattggtctcgtcatcaaaccaggggtaagtacttacttcgaatccagcgccttcaaatatggcgatgtggttttcccaggtcgggtcgctaacccatacgcgcgactgcgggaagtagcgcttgaggaaatcggcgccgactttcaacgcgccggagccacccagggtttgaattgacgctacgcggttttgtttcaacaccggatggtcggcgccaaacagcagcggcgcaatggcgtggcggtagctattgagcccttccatcggcaaatacagcgaagcgccatgcggctgggcattgaggcgcgcttcggcttccgctactgcctgtagttgcggaataatgccgtcttcgttgtagtaaagaccaatgctaaggttcactttgtcactacgcggatcttctttgaaacgctccatcaaggagagaatggggtcgccggcgtaggcgtcaactttttgaaacacgagatgtatctccaggtttacgaaagcaggtatttacacaataaaccggaagttggggaaggtcgaggggatgttggtaagttatcgacaaagatcgctgcaaacatgggcgacgccgcgcgccgccccttctcattaccccgataagcgtagcgtaatcggagaaatatgccactgagaatcgttagtcgaggtagcggatagccagcctggaggtcagtcgggtgataagttcgtaagcactcactttcgtaatttccgcgatgcgctcaacgggtagcccctctccccataacacaaccggatcgccggcttcatccttcgcctgagggccgaggtcaacgcaaatcatatccatcgccacgcggccgactatcggcacttcgcggccgttgaccagcaccggcgtgccggagggcgcggcgcgtggatagccatcgccatagcccatcgccacgacgccgaggcgagtatcgcgctcgctaatccaggtgccgccgtagcccaccggctccccggctttatgttcgcgcaccgcaatcaggctggaggtcagcgacatgaccggcaggcagccgaaatcctcaccggtagagtggttctccagcggcgaaacgccatagagaataatgcccggccgcgcccagtcgaaatgcgactgtggccatagcaggatcccgcccgaggcggcaatagaacgcagccccggcttaccttcggtaaaggtggtgaaaatatccagctgacgctcggtcgcgccgcattcaggctcatcggcccgagcgaaatggctgacgatattcaccggttggcgaacatttttgcaccggcttagccgctgatagaacgcttcggcctgttccggcagtacgccaagacgatgcataccggtatccagcttcatccagacggtaaccggttcggccagttccgcttgttcgagcgccgccagctgttccgggctatgtaccacggtatgcaggcgctgcgcggaaatcagcgccagatccgccgcttcaaagaagccttccagcagcaatatcggttgggtaatgcccccttcacgcaggcgcagcgcctcttccaggcgggcgacgccgaaggcatcggcgtcggtcagcgttcgcgcggtctcaaggaggccgtgtccgtaggcgttcgctttcaccaccgcaaccagtttgctggcaggagccagttcacgcagacgttgcaggttgtgtcgcagagcgcggcggttgataactacagttgccgcttgcatttgaattccttaaaaaaagacagacggaggattactcatcgtcatactgagggccggcataattatcgaaacgcgaccactgaccgttaaaggtcagtcgtaccgtaccgatcgggccgttacgttgtttaccaatgataatttcagcaataccttttaaatcgctgttctcgtgataaacctcatcacggtagatgaacatgattaagtcggcatcctgttcaatagagccggattcacgcaggtcggagttgaccgggcgtttatcggcgcgctgttcaagagagcggttcagctgcgacagcgccaccaccggcacctgcaactcttttgccagcgccttcagcgagcgggagatttcggcgatctccagagtacggttgtcggagagcgacggtacgcgcatcagctgcaggtagtcgatcatgataaggccgataccgccgtgctcgcgggcgatacgtcgggcgcgcgaacgcacttccgtcggcgtcaggccggaggaatcatcaatataaatgttccgtttttccagcaagatacccatagtgccggagatacgcgcccagtcttcatcgtccagttggccagtacggatacgggtctgatcgacgcgcgatagcgaggccagagaacgcatcatgatctgctcggatggcatctccagactgaagattaataccggcttatcctgcagcatcgccgcgttttccacgaggttcatcgcaaatgtcgttttacccatcgaaggacgcgcggcgacgataatcagatccgaaggctgtagcccggcggtctttttgttgaggtcgtcatagccggtattcaccccggtgacgccatcgtgcggctgttggaacagctgctcaatacgggcgacggtggcatcgagcacatcggcgatgttcttcggcccttcgtctttgttggcgcggctttcggcaattttaaatacccgcgattccgccagatccagcagatcctcgctggtgcgcccctgggggtcgaaaccggcttcggcgatctcgttggccaccgaaatcatttcacgcaccaccgcgcgttcgcgcacgatgtcggcatacgcgctgatgttcgccgcgcttggcgtatttttggagagctcggccagataggcgaagccgccgacgctatccagttgcccctgacgctcaagcgattcggcgagggtgatcaggtcaatcgggctacctgactcttgcaggcgcgccatctcggtaaagatatgacgatgcggacgggtatagaaatcttccgacaccaccctttcggcgacgtcgtcccagcgctcgttatccagcattaaaccgcccaacaccgactgttccgcttcaatcgagtgcggcgggactttcaacccagcgagctgcggatcgcgttcgcgaggttctgtctgtggtttgttgaagggtttatttcctgccatagtgaatggagttacctgtaaatgagagacacaaaattataaaggagttcacatggcaacacgaattgaatttcccgcgcatggaggccccgaggtgctgcatgcggtcgagtttacccccaacgatcctgccgagcacgaaatccaggtagaaaataaagccatcggtatcaactacatcgacacctacatccgcagcggcctgtatccgccgccctcgctgccgagcggcttgggcaccgaagccgccggtattgtgagtaaaatcggcagcggcgttaaacatatcaaggttggcgatcgggtggtatacgcccaggccgcgcttggcgcttatagctcggtgcataacgtgcatgccgacaaagcggcgattttacccaatgcgatttcctttgagcaggccgccgcctcgtttcttaaaggactgaccgtctggtatctgctgcgcaaaacttatgaaatacaagccaacgagaccttcctgttccacgcggcggcgggcggcgtggggctgattgcctgccagtgggcgaaagcgctgggggcgaaacttatcggcaccgtcggcagcgagcaaaaagcgcagcgcgcccggcaggccggcgcctgggaaaccattaactaccgcgaagagaatattgccgagcgcgtcaaagcgctaaccggcggcaaaaaagtcgccgtggtttacgattccgtaggaaaagatacctgggaagcctcgctcgattgtcttcagcggcgtgggctgatggtaagcttcggcaattcatctggcccggtaaccggcgtgaatttgggtatcctcaatcagaaaggctcactctatgtgacccgcccttctctgcaaggttacatcaccaaccgggaagagctgacggaagccagcaacgagctattttcgctgatcgccagcggtgtgatcaaagtcgatgtagcggaaaatcagaaatacccctgcgtgacgccagacgagcacatgagattctggaaagccgggtgaccgagggatcgagcctgctgttaccgtaacgggatgagatcgccagaaaagtttagggcctcctgacggaggccctgactttttttgttcggctgtatgtagggtacagcgcgatgaattcgttatcgcgctaatagtgacagatttaatacgcaatgcctacgctgttttatgcaaaattactcaggttgtgacacaccgctcaatccccagaatggtggcttagtagcgccagcgatcttcgcggcgataacgggttgtcgtcggcgatttcatcgcccgaatgacccacacgacggccaccgccagcagtagccagggtagcagtttaaacattaatgcgaacaggcctccgaagaacattaacgccgtggcgacgaccagcgcggcaataatgccaagcagcgagatgccggtgaccaacaacatgacaaaaaagccaataacaaataagagttccagcatggtcttctcccgaaataaataaccagatagctgattggctatttcaagaatcatgccaaatataacttattgaataataacaaaacgccctgcagcaatagcgcagggcgtggcgaaaaagaccaggttttagcgaaaaaattaacgcttatcggcaaccagcttcagcgcgtgttccagaacattgatatcggcgccagctttatgcgcattctcgctcaggtagcggcgccattgacgcgccccagggatcccctggaacaaccccaacatatggcgggtaatatggccaagataggtgccgttgctgagctcacgctcgatataggggtacattgcgcgcaccaccgccaccggatcggcatccgcgccgtcgacgccgaatatctcgcgatccacagaagccagaatgcccggattttgataagcttcacgccccaccatcacgccgtccatatgctcaagctgctgtttggcctctgccagagatttaattccgccgttaatcgccatcgtcagatgcggaaaatcacgtttcagttgccagacgcgcggataatccagcggcgggatttcacggttctcttttgggctcaggccggaaagccaggctttacgggcgtgaatgatgaacatttcgcactcccctttgccggagacggtctcaatgaaatcacacaggaattcatagctatcccgatcgtcaatcccgatgcgggtttttaccgttaccgggatcgacaccacgtcgcgcatcgctttgatgcagtccgccaccagcgcggcgttgcccatcagacaagcgccaaacatcccgttctgcacgcggtcagagggacaaccgacattgaggttaatctcgtcatagccgcgcgcctcggcgagcttcgcgcattgcgccaacgccgcaggatcgctaccgcccaactgcagcgccaccggatgttcttcctcgctataggccagatagtcgcctttaccgtgaataatcgcgccggtagtgaccatttcggtgtacaacagagtatggcgcgacagcaggcgcaggaagtaacggcagtgtctgtcggtccaatcgagcatgggcgcgatagaaaaacggtgggcggcaaaagcggtagacgtggattctggcatcatggcgaataaataagcatccgggtaaaaaggggcgctactatagcacaaacacaaaccacggcgcatagcgtcgaacgccacgcgccatggtcaaaatgtggcctatattttccgcggtttaccgtcgtgcgggccaaagaactgcggagggtgatccacccaccggtcctggcgagtcgcggcatagcccggattcaacggatagtaaatacggttgtgctttttattcgcctcgccaacgaccagcagccgcacctcctgctcggtattattcagaaaggtatggcatacgccagtccccgccggaaagccgacgctatcgcccggctccagcttccatagatagccattgatccagacttccggaaagccttccagcacgtagataaactcttcttcatcgctttccgcgtgcggataagaggtccttcgtcccggcggtaaacgttcatgatggatgcccagccgatttagccgtagaccgcgggcaagaggcgcgccaatagaaaacagctcgtgactatcggggtaggtggaatcatccgcaccttccagttcgcgccaatgtcgaatgcaatcaggtcgtttcatcgttttctcccgaaaatgagatacatcaggtatagcaaagctcgcagattctcggcgttttacctgtttcgtgataaagtaacagtttcaacatcacgcaaccagaggatgctcatggataacaccacttcgcaagaaatgttagcgcaggctgaaaagctttgcgtgcaacgtggcgtacgcctgaccccgcagcgtctggaagtgttgcgtctgatgagcctgcagcaaggggcgattagcgcctacgatctgctggatctgctgcgagaaaaagagccgcaggcgaagccgcccacggtctatcgcgcgctggagtttctactggagcaaggttttgtgcacaaagtggaatcgaccaacagctatgtgctgtgccaccttttcgatcagccaacccacagttcggcgatgtttatctgcgatcgctgcggcgtggtcaaagaagagtgtgcggaaggcgtagaagatatcatgcatacgctggcggccagaatgggctttgctctacggcataatgtgattgaagcgcatggcctgtgcgcggcgtgcgtggaagtcgaagcctgcagcgcccgcgaacactgtcatcacgatcatactatccagattaaaaagaaagcccgctgagtcgggcgacatcagcgggaagctacggcatatcactatgccgttagacaggcataaacaggggtcaaaaccgcgttcgctaccagcgcgtatcgttcttacgctcccagtcagacacctctttttcggcctgatctttggcatagccgtagcgttcctgaattttaccgaccaactggtcgcgcttcccttcgatgaccgtcatatcgtcatcggtcagcttaccccactgttccttggctttacctttcaactgtttccagttaccgctgatttcgtctttattcatcattacgtcctcatcattcggtgggttaacagcccgttttgttccggacatggtaataactatagatgacaatgctgacaccgattcgttattcggaatttttaaccatcaggccgattgaaaacgctgggggattttcccggctcgcgctacgctcagccgggctagctatattcaggagggttaactaaaccatgtgccacgctgccagtggcggcgccagatgagcgccagcgaaatcccgcgcagcgcgaggaacaccgccagcgccagccacaggccgtgattgccgagcatgggcacagagagcaacgtcaccgcaaaccccgcagcggctaccgccatgctattacgcatctccgcgccgcgcgtcgcgccgataaacatgccatccagcagataacaccagacgccaatcaccggtaggatcatctgccagaacagatagcggtctgccagctgctgcaatgatgggatagaggtcaataacgcgacgatctgctcgcccgccacgctgtagataagcgcaaacgccagcgccaccatccccgactgccgacaggccgcgcgccagacttccagcagttgactgccatcgcgcgcaccgtaggcctgtccggaatgggcttcgacggcataggcaaaaccgtccagcgcgtaagcggtaaaggtcagcatggtcatcagtaccgcattgaccgccaccacgtcgctgccaagacgggcgccgaagacggtgatagcgccaaagcagagctgcagcagcagcgaacgcagcatgatgtcgcggttaagcgccagcaggcgccgcatattgccgcgccacgcctccttcaacatggcaaacgtcacgccgcgcagcgccagaacccgtttcgccatcagcaggccgatgataaaggtggcgtattccgacagcgccgtcgccagcgccgccccctgcacgttcatccgtagccccatcaccagccacagatcgagcacgatatttagcaaattaccgaccaccagcaggatgaccggggcgcgagcgtactgcacgccaagcagccaccctaacagcaccaggttggccaacgacgccggggcgctgagccagcggatttcgaggaaccgtctggcctgttccagtaccgcttcgctcccaccgacgatatgcaaagcaaggtcaatgagcggcatgcggaacagaacgatgagcagcccggcagccagcgccaggataagcggctgcaccagcgcgcgcgccagccgctgcggatctttggcgccataggcctgagcggttaagccagtggtgctcattcgcaggaacagcagcagcataaagaggaaactggtggccgtcgcaccgacggcgacgccgccaagatagactgagctatcgagatgaccgacaacggcggtatcgaccagccctaacagcggaacggtgatgttggagaaaatcattggtagcgcgaggcgccacaatgctttatcggcggcgttgagcagcatgaagagggaccagaaagaggaggaacatcgcagcgtcatgcatcatgatgacgctgcgttaagacgggagttacagccactcaccgttacggatcacgccgacggcgagaccttcaatggtaaagttctgctggcgcagatcgacgacgatcggggaaaactcgctgttttccggcagcagttcaacgacgttgccctgctttttcagacgttttacagtcacttcttcatcgatacgcgcgacaaccacctgaccgttacgcacgtcctgagttttatgcaccgccagcagatcgccgtcgaggataccgatgtctttcatcgacatcccgctaacgcgcagcaggaagtcggcattcggtttaaacatcgccgggtcaacctggtagtggccttcaatatgctgctgcgccagcagcggctcgccagcggcgacgcggccaatcagcggcaggccatgttcttcttccgtcagcagacgaatgccgcgggaagcgccggagacgatttcaatcgcgcctttacgcgccagcgctttcaggtgttcttccgccgcgtttggggaacggaaccccaagcgctgagcaatttccgcacgcgtcggcggcatgcccgtctggctgatgtgatcccggatgagatcaaacacctcttgctgcctggtcgttaacgctttcattccgcccctgggtgtatatacagttatgctgtgagtatatacagctaatggtgattttggaaccacatatcatataaaaatcaggagattctttgcgttttgcgagcgttgccgacaagacttagcggtaatgcgaccacagcaacacagtccaggtgatcagcgcgatgattatcgccagcagcaccgccgccgaccccatatccttggcgcgaccggaaagttcgtggtgctcaggcccaatacggtcaaccaccgcttcaatcgcgctattaaggatttcgactatcatcactaacaggaccgagccaatgagcaggactcgcgtaatagcatcgacatccagccagcaggctatcgccacggccacaatggcggcaacgccttcctggcggaatgcggcttcgttcacccacgccgcgcggaaacctttccaggaataacctgctgctttaatgattctggttaacccagtggtattattggccatcaaaaagaaccttttaatgtaaatgacgtcgacgagtgtacgtgtttgccgtgcgacaacggaaattttgtacgctttctgttattcttgccgcgcatttgcatgattaaccagaggcttcacatcgtttatgtccggctggcaacgaatttactataaattactgaatttaccattacgggtgctggtaaaaagcaagtctattccggcagaacctgctcaggaattagggctcgatacctcgcgtccgataatgtacgtcttgccttataactccaaggcggacctgctgaccctgcgcgcccaatgcctggcgcatgatttacccgacccttttgaaccgctggaaatcgacggcaccctgctgccgcgctacgttttcatccacggcggtccgcgcgtgtttacctactacacgccgaaagaagagtccatcaagcttttccacgactacctggatttgcaccgtaaccatcccgatctcgacgtgcaaatggtaccggtgtcggtgatgttcggccgtgcgccgggtcgtgaaaaaggcgaagagaatccgccgctgcggatgctgaacggtattcagaaattcttcgccgtttcctggcttggccgcgatagcttcgtgcgtttctcgccgtcggtctctctgcgtcgcatggcggatgagcacggtactgataaaatcatcgcccagaagctggcccgcgtggcgcgtatgcacttcgcccgtcaacgtctggccgccgtcggcccacgtctccctgcccgtcaggatctcttcaataagctgctggcgtcgaaagctatcgcccgcgcggtagaagatgaagcgcgcagcaagaagatttctcacgagaaggcccagcagaacgccatcgcgctgatggaggagattgccgccaacttctcttatgaaatgatccgcctgactgaccgtattctgggctttacctggaaccgtctgtaccaggggattaacgtgcataacgctgagcgcgtacgccagttggcgcatgacggccatgagattgtctatgtgccctgtcaccgtagccacatggactatctgctgctctcctatgtgctctatcatcaggggctggtgccgccgcatatcgccgccggcattaacctcaacttctggccggccgggccgattttccgccgcctgggcgctttctttattcgccgcacctttaagggcaacaagctctactccacggtattccgcgaatatcttggcgagctgttcagccgtggttattcggtggaatactttgtcgaaggcgggcgttcccgtaccggccgtctgctggatccgaaaaccggcaccctgtcgatgactatccaggcgatgctgcgcggcggtagccgccctatcacgctggtgccgatttatatcggctacgagcacgtgatggaagtcggtacctacgccaaagagctacgcggcgcgacaaaagaaaaagagagcctgccgcagatgatgcgcggcctcagtaagctgcgtaatcttggccagggctacgtaaacttcggcgaaccgttgccgctgatgacctatctcaatcagcacgtgccggaatggcgcgaagccatcgatcctatcgaagccgtccgcccttcctggctgacgccgacggtgaataatatcgccgccgacctgatggtgcgcatcaacaatgccggggcggccaacgctatgaacctgtgctgtactgcgcttctggcgtcgcgtcagcgttcattgacccgtgagcagctaacccagcagttggattgctacctcgacctgctgcgtaacgtgccgtactctaccgattcgaccgcgccgacggcttccgccagcgagcttatcgaccacgcgctgcagatgaacaagttcgaagtcgagaaagacaccatcggcgatatcatcatcctgccgcgcgagcaggcggtgctgatgacctactatcgcaacaacattgcccatatgctggtgatgccgtcgctgttggccgctatcgtgacccagcatcgccgcatctctcgtagcgaagtgctgcgtcatgtcgagatgttctatccgttcctgaaagccgaactgttcctgcgctgggaaaaagaagaactggcgggcgttatcgatgcgctgatggcagagatgcagcgtcagggcctggtggtgctgaatggcgatgagatgagcgtcaacccggcccactctcgttccctgcagctattggccgccggcgcgcgcgagacgttacagcgctacgcgatcaccttctggctgttgagcgccaacccgtccatcaaccgcagtacgctggaaaaagaaagccgcaccatggcgcagcgtctgtcggtactgcacggtatcaacgcgccggagttcttcgataaggcggtgttcagtactctggtgctgaccctgcgtgacgaaggctacatcagcgataccggcgatgccgagccggcagaaaccctgaaggtctaccagatgctggcggatttgattacgtcggatgtacgtttgacgattgaaagcgccgctcaggacgacgcataacgttgcggcttctgttccccggctcgcggcgcgagtcggggaaagaaggacttactgcaggtaactcatcgccagaccgagaaacagcaccaatccaacgtagttattattcataaacgctttgaagcagttatcgcgttcgcgcttgaagataagcttctgttgccagacaaacagtcctgccgcgataaacagcgaccagtagaattcccagctcagcccattcagccagcccaccgcgcccatcaataccagcacggcaacctgcagaataccgataatcaaacgatcgttttcaccgaacaggatcgccgtcgacttaatgccaattttgacatcatcgtcgcgatcgaccatcgcgtactgggtgtcgtaggctaccgcccacagaatattggcgaggaacatcagccagcagctgagcggcagcgcttcacttaccgccgagaacgccatcgggatcgaccaaccaaaggccgcgcccagcaccacctgcggcagatgggtgtagcgcttcataaaggggtagacccaggccagcgccagcgccgcgaccgacagcaggatggtcatggtattgagcgtcagcaccagcaggaaggagagccccaccagcaccgcgaataatatgcgcgcttctttttccgtgacctcaccgcttggtaacggccggcgagccgtacgcttaacgtgaccatcaaatttacggtcggcatagtcattcacgacgcagccggcggcgcgcatcaaccagacgccagcgacaaataccgccagaatccacagcggcggtaccccgggtgaagccacccataacgcccacagcgtcggccacagcagcaatagcgcgccgattggtttgtcagtacgcatcaggcggtgaaacgccaacagcttattctgcgtcagactccactccattttctcttcctcttaatacaatggcgatgcaggcagaaaaagctctgtcagcagcagcggtttgccgctcagccggagacgggaacgtcgccccacagctgtgcactacggccaatctcaataaaatcacgggttaacgtcgacgacgtaaacagataccggcccagcggtgtctgccccaactgctgcagggctaattccgggccgcatagcgtcgattccggcacgagagtacgaccggcaagccagggttcgccatcggcgcaaagaatgatttcccgcagccaataccgcgcctcttccggcagcagggcttcttcgcccgccagcgcgtcgcgcctgacgaaaccttcgttaatcatggtcacggtgacctttttcccttgttgctcaaagcgtttggtcattgagtcttccagcaacagccagtcgcgcagcggcgcgtccagctcgggtatgacggcaaaatagcgcagcgcacgcagttgcgtaagcgcaggatgtggcatgcctgattctccggtacaaaacgtgcaggcattgtatcgcagaatagcgttttgagggcgggcaaacgtcaatatacgatcatccgcgcaacaggcatgcaacagttgccgctgcgcgataaaaaaaagtgcgtccaggcggacgcacctaaaggctgtgcctaaacatcagcattgtggggagacggtcaccccttgccttttacactgctgataaaggtggaacgagcagatttcgagccgaggcgttcagcttcgttcatcaatttcagggctttgtcgatatcaccttgcttcaccgcctgcttaataccgttgttgaagtaggtttcggtatcgtcaagcatcggttcgcttttcgccgctggggcggcggcgaccggcgcgacaacaggcgcagcggccggggcgttatagaccggcgccgcggtattgccgacggtcaccgggccagggccggatgatccaaacagcgggcccaccagcacgctggaactcgaagacgttttcaccttcaggctcaaggtgccgtcagtggtatgtttggcgatcggatccggaatgtccggcaccgcgttaccggtgcctttcgcgtaggctttcgccgggtcgattaatttggtggtctgctgcagatcctgcggagtggtaaacaccagcacataaattttctgctgtcccagcgccggcgtcaggcgcattatcccttccaggcggtcggcgctcatcacgcccggctccagataagtgaaatagctgctcgggaagaaggcggacggcgtcatgctctgatcgaggatcaggacatttggcgcgtagacgctagtctgtttgtcgacttcgctggtcagcgtcagagttaactcgccgatattggccggtacgctataggccaccaccggcccggcgataccggggacattcaacgtttgtcctgcgatcgccactttagaggtttgggttttcgattgatcgaccggcgtccaggtcaactgttgcagcgaggaagccgggattgacggcgcggcagaggtattctgcggcacgaaattgacatcagcaaaactgactgcgggtacgctggccagcaggccggcggacaggcagagggcaacgagacttttcttcatattcattgttatcacctcaattcctatggccgagcgttagccaggcaatagcgcgctgggccgaaaacagagggctgatgcccctcttttactcatcatgatgcggatagcattaccaccagatttccatctgggcgccgaaggtccactcatcgtcgtcgccgcggctggaagtgttgataccggtaccagaggtatcgcgcatggcgacgccgctatcggtgtaaccccacttctcatcccacttcgcgtaggtggcgaacagacgaattgccggacgggaccagatgctgtcgcccgcctgccactgttgcgccagggtgattttgtactggttgttgctgtcgccggttttctgcgatttgacattgtcgtagccgacttccagcagggtgctcatgatcggcgtccatttgtacataggacgtacgccgacggtccaccatttggtaccgttgttgttgtccaggttgacgtcctggtacatggcgacgtacatcatgtcccaatcgtccgccagagagaccgcgccgtggtcaagcacacgccacatggaaccatcgttattaatgctgccgccctgcggtacgcctttaccgttggaggtcatggcgtcggtcgcgtactgcagaacaaatttgttgtagcctttcaggatgctctgggtatgttcagcggtgaacatccagccatctttcgatgcatccggctgcaggtagtagtcatccggcacgttggtgtgaccatagtccacgcccagctccagcgtaccgccagggttggtttccatctgcgctaaacgcacatcgaagacgtcgttcggtaccagatgatcataaacgcgttcgccagtcagcggatcgcggtcagcataggttgccgagccgccggattcagaagaacgagtggcggccagagagagtttaccgaaacccagatcgatgttttcgataccggcgccaggaccggagatatcccagtagtagaagtcgatcatgtgaacgtcatgacgctgatagaagcgcttaccggcccacagggttgaacccggcagccagtcgatcaggtttttaccctgcacgttaacttcacggaaggccgggctggtagattcccagtcgttctgctgcgataccgagtaggcaacgttggtatcgaagtagaagctcttatcgccctctttccacacttcctggcccagtttcagttcagcgtaagtttcacattcgttaccgagacggtatttactttgagcgccggtggcctggaagcactgctgttcgccgccgctgccggtccagccaatgccggaacgcgcgtagccatggaaatcgacagccagcgcctgggcagacatcacgcccgccgcaacggctaccgccagtggaagtttgcgcagagtaatcatcattctatctcctgagatcattgcttttctttgaacacttccccgtcggccgccgcatggttggctgcgcgctgggttcgcgtcttcttttaatggggaaccttatacgcccggctctttatgcaaccgacgacaagcggtgccatcctcacggaataaatggcagcgctccggcggcaaaccgatggcgaatgtggctccctcttctaccaacaccacgtcattctggcggtacaccaggttctgacggatggcggggatctggatatgaatttgcgtttcgtgaccaagctgttcgaccacctgcacttcgccctcaagggtgacatcggcgatgtcgctcggcagcaggtgttccgggcggatgcccaaagacatattggcgccgacctgaacgtgggcgctatctaccggcagccagacctgctggcggttcggtagttcgacctgtacctgttcgatagcggtcgcggtgactttgaccggcaggaagttcatcttcggcgagccaataaagcccgcgacgaagcggtctgccggatagtgatagagttccagcggtttcccgacctgcgcgacgcggccggcatccagcacgacgattttgtcggccagggtcatggcttccacctgatcgtgggtgacgtaaatcatcgtgcgaccaaggcgcttatgcagacgggagatttcgatacgcatctgcacgcgcagcgcggcatcgaggttggacaggggctcatcaagcagaaaaacccgcggctcggcgaccagggtacggccgatggctacacgctgacgctggccgccggagagcgctttcggcttacgctccagcaggtgcgccagttgcaacacctctgcgacctgagtcacgcgctggttaatcatctcttttttcgccccggccagtttcaggccaaaagacatattttcggcaacggaaaggtggggatagagcgcataagactggaataccatgccgatgccgcgctcggcgggcggcacatcgttcattcgggtatcgccaataaacagatcgccgctggtgacggtttccagtccggcgatcatacgcagcagggtggattttccgcagcccgacggtccaacaaacacgacgaactccccatcctggatctcgagattgatatctttagataccaccacgtcgccccaggctttcgttacatttcgtagctgtacgctcgccatgcccttctcccttcgttacaacctgtcacttaaagacacattcaagatgggctgactatgcggcattcattacgttggcaaatcctccacccccgggtttttgatggggaggagacgggaggatgagaaattgcctctcgccgccggaagttcccggcaaaaggtcatttcgtgatcgaagcgacaaaaacggtggcttttttatgtgctccagggcccattaccggcatttctgcaatgtggatcacataaacggcggatggggcgtagacatggggaggatggaaagaggttgttaaaaaaggaaactcatcagcgttaagccactcaagtgtatccacgagcacatcaccaaataggacgggtatatgaaaatcaaaactggcgctcgcatcctcgcgctgtctgcattgacgacgatgatgttttccgcctctgccctcgcaaaaattgaagaaggtaagctggttatctggattaacggcgataaaggctataacggcctcgctgaagtgggtaaaaagtttgaaaaagataccggcattaaagtttccgtagaacatccggataagctggaagagaagttcccgcaggttgcagcgaccggcgacggcccggatatcatcttctgggcgcatgaccgtttcggcggctacgcgcagtccggtctgctggcggaaatcagcccggataaagcgttccaggacaaactctatccgttcacctgggatgccgtacgctacaacggcaaactgatcgcttacccggtggcggtggaagccctgtcgctgatttataacaaagacctggtcccgaacccgccgaaaacctgggaagagatcccggcgctggataaagcgctgaaggcgaaagggaagagcgcgctgatgttcaacctgcaagaaccgtacttcacctggccgctgattgccgccgatggtggatacgcgtttaagtttgaaaacggcaaatacgacgtgaaaaacgtcggcgtcgatagcgccggtgctaaagccggtctgaccttcctggtcgacctcatcaagaataaacacatgaacgccgacaccgactactcgatcgcggaagcggcattcaacaaaggcgaaaccgcgatgaccatcaacggtccgtgggcgtggtctaacatcgacaagagcaaggttaactacggcgtcactctgctgccgaccttcaaaggcaaaccgtctaaaccattcgttggcgtactgagcgccgggattaacgccgccagcccaaataaagaactggcgaaagagttcctcgaaaactacctgatgaccgatcagggtctggaatcggtgaacaacgataaaccgctgggcgccgtggcgctgaaatccttccaggagaagctggagaaagacccgcgtattgccgccacgatggctaacgcccagaaaggcgaaatcatgccgaacattccgcagatgtctgccttctggtatgccgtccgtaccgcggttatcaacgccgcaagcggccgtcagaccgtcgatgccgcgctgaaggatgcacagggccgtatcaccaagtaataccgtcgcgcacgtgccggatggcggcataaatgccttatccggcctacacaccttgtaggcctgataagcgcagcgccatcgggcacttttgtcgacagatatttaacgttgtagaggatgatccccatggatgccgttaaaaagaaacactggtggcaaagcccgcaactcacatggtctgtgattggtttgctgtgcctgctggtgggttaccttgttgttttaatgtacgcccagggggagtacctgttcgccatcatgacgctgattttaagctcagttggcctgtatatcttttccaatcgcaaggcttacgcctggcgctatgtttatccgggtctcgccgggatggggctgtttgttctgttcccgctgatctgcaccattgccatcgccttcaccaactacagcagcaccaaccagctgaccttcgaacgcgcccagcaggtgctgatggaccgttctttccaggccggcaaagcctataacttctcactctatccggcgggtgacgagtggcaactggcgctgacggacggtgaaagtggtaaaaattatctctccggggcctttaaatttggcggcgagcagaaactaacgttaaaagaagccgatgccctgccgcaaggcgaacgcgcgaatttacgcgtaatcacccagaaccgcgccgcgctgaaccaactgaccgccgtgctgccggatgaaagcaaagtgattatgagttcactgcgccagttctccggcacccagccgctgtacgcactggctaacgacggcacgctcactaacaaccaaagcggcgtgaaatatcgccccaacgccaacatcggcttttatcaatccatcaatgccgacggcagctggggcaatgaaaagctgagcccgggttataccgtcaccatcggctgggataacttcacccgcgttttccaggatgaagggatccagaagccgttcttcgccattttcgtctggaccgtggtgttctcggtgctgacggtgattttgaccgtcgccgtgggaatggtgctggcctgcctggtgcagtgggaagcgttgaagggcaaagcgatttaccgcgtgctgctgattctgccgtatgcggtgccgtcatttatctcaatactgattttcaaagggctgtttaaccagagctttggtgaaatcaacatgatgctgagcgcgttgttcggcattaaaccggcctggtttagcgacccaaccaccgcgcgcacgatgatcatcatcgtcaacacctggctgggctacccgtacatgatgatcctgtgcatgggactgctgaaggcgattccggacgatctgtacgaggcgtcggcgatggatggcgcgggcccgttccagaatttctttaaaataacgctaccgctgctgatcaagccgctcacgccgctgatgattgccagcttcgcctttaactttaacaacttcgtgctgattcaactgttaaccaacggtggcccggaccgtctcggcaccaccacgccggccggttataccgacctgctggtgagctacacctatcgcatcgcctttgaaggcggcggcggtcaggacttcggcctggcggcggctatcgccacgcttatcttcctgctggttggggcgttagcgattgtgaatctgaaagccacgcgcatgaagtttgattaagggagataacaataatggctatggtccaacccaaatctcagaaactgcgtctctttacgacacacctgttgctgctgatttttatcgccgcgattatgttcccgctgctaatggttatcgctatctcgctgcgcgaaggcaacttcgcgaccggcagcctgatcccggataccatctcctgggagcactggcgtctggcattaggcttcagcgtcgaacacgccgatggccgggtaacgccgccgccgttcccggtcctgctgtggctgtggaactcaattaaggtcgccgggattaccgcgatcggcatcgtcgccctctccaccacctgcgcttacgctttcgcccgtatgcgcttcccgggtaaagcgacgctgctcaaagggatgttgattttccagatgttcccggcggtactgtcgttagtggcgctgtatgcgttgttcgaccgcctcggtcagtatctgcctttcgtcggcctcaacactcacggcggggtgatcttcgcctatatgggcggaatcgcgctgcacgtctggacgattaagggctacttcgaaactatcgatggttcactggaagaagcggccgcgctggatggcgccactccgtggcaggccttccgcctggtgctgctgccgctgtcggtgccgattctggcggtcgtgtttattctgtcgttcatcgccgcgattaccgaagtgccggtggcctcgttgctgctacgcgatgtgaacagctataccctggcggtggggatgcagcagtatctcaatccgcagaactacctgtggggcgacttcgccgctgcggcggtactgtcggcgattccgattaccgtcgtcttcctgctggctcagcgttggttggtcaacggcctgacggcgggcggggtgaaaggttaagtttcatcatgttagacccttgttttatcgccccaaatttcagagagggtgggatgtggtacacgaccccaaccgggtacggcagcccacctctccctgaaaaagtagggcaaatgccactgcaatcctctactggaccctacataaatttcatttgtgattgtcggtcaagcggccctggaggccgctttttttattcccgtttcaggcggttggaattacacaaccatagggtaatcacaaggataaggatcgccgcagagtaaatcagcaccgccatcggcgactcatggtcgacgataataagccgcacaatcgccgtaataccgatatagacgaaataacgcagcgggaagtgaaaaccggactcaaagtatttcacaatcaacgcgataaactcgaagtagagaaaatagaccaccagcccttcgaccagcttgtacttactcaccggctccggcgtaaacagcacgtgcgccagatgcagggtctcctttcccaggaacaccaccagaataattcccagacacagcagcgccaggttgagcacggcctgcatggccttcgcaacaaaattaaccagcggacgatataccgacggcatagtgacacctcaaatgcatgaacgttattgatctgtatagcgcaaaagtgtgatccagatctacttcgctttgcgagcagcatcggtccttcaacgcggtaaatgcaactaagagaaaattttacttcctacaatgctgtgagcaagttaaccaaatcatccattacgcttaggacaaaaccaaataaccaactgaaatttaaagcatttaccatttgaaacagttatatctcaaaacctgccacaagataaaatttttctctaaaccgcattatttatatggctattagggtaagatttttctcatcctttgtcttagcattatcgcagttgaataaaatttaattttggacattaaatcattatgaacaccgataacgcttccctgtacgtaaaatggctcaaacaagaagttgccccagcgttaggttgtactgaacccgtcgctatttccttcactgccgcctacgccgcacaatatctggatcagccttgcactagaattagcggttttatttccgccaatctctataaaaacgcgatgggcgttactattcccggcaccgccgtttgcggcgtagcgcttgccgccgcaattggcgcatttggcggcaatccgcaaaagggattaaaaacgctggaagatatcaccccactacacgtcgaaatggcgcagaagctgatcgccaataatgccgttgatattgccgtcgaagagactccggactttattcatctcgatttaaccctctctgctggcgagaataactgtcgcgtcgtggtgaaaggaacccacaccaacgtggtcgaactttatattaatggccagcaacagccattaagcgcaaaacagaatgcgagcgcccggcacgaaacgctgcccacattttcgctacagcaggcttacgactttattaatagcgccgactttaatgatattcgctttattcttgaagccgcgcgcttaaactccgcgttggctgcagaaggcaaaaccaaaaaatatggcctgaacattaacggtacctttgctgacgccgtgaaaaacggcctgatgagcaacgatctgttaagcaaggtgatcatcgacaccgtcgccgcttcagatgcccgcatgggcggcgcgccggtggtagcgatgtctaacttcggctcaggcaatcagggcattgcagcaaccatgccggtagtggttgttgcagagcatctcggcgtcgatgaagagacactggctcgcgctttgtctctatctcatctcaccgccatctcaattcattctcgttacacgcgcttatctgcgctatgcgcggcctcaaccgccgccatgggcgccgccgccgggatggcctggctgtttacccgcgatatcaacaccattaataccgcgattattaatatggtcagcgatattaccggcatgatttgtgatggcgcctctaatagctgtgcgatgaaagtctcatctgtagtatccagcgccttcaaggcggtactgatggcaatgcaaaatagctgtgctggcgccaatgacggtattgtctgcgccgatgtcgagcagactattaataacctgtgtcgcctggtgattaaaccaatgaccctcaccgataaagaaattatcagcatcatggtcgctaaataataatatttaacgggcctgaacgttcaggccctgattaacctaccctacccacactattatttataaattagcaggtatagcagatgaataaaaaagtcatcttccgcggcgccagcgccattatgccgctgtgcatcggcgactttccattttcatttattgtcggcgcattaagcgttagcgcgggcatgagcgtctggcagagtacggcatggtcggcgattgttattgccggctccgcgcaaatgctggcattaaatatgcttaaaaccggtgccacgctcggcgttattatattcaccacattaataattaatctacgtcatgtactgtacagcgcctctatttccggtaccgtccgtgaagcgtcattctttaaaaaatgctttatgtcctacgcgctgaccgatgaagtgtacgccaccaccgtcaaagagatggaaggcaataagcaggataagtatctgttttatggctcggcgatgatcaccttctgggcgatttgggtactggccgatttcctcggcgcgctggtcggcgcctcattcccgaatattgaaaagtatggtctggatttcgccatggtcgccgcctttatcgccatcgtggtaccacagatcaagagccaggcctgtaccgtcgccgccgtggtggccgccgtctccggcgtgctattggtcatcctgccctactccctgggtattgtcgtcgcctcagtgcttggcgtgctcgctgggctgtgcgtcgacctggctgaagaacgtaaacaggcagcaattgccgaatccgggatgccgctcgtggaggcgctggaacatgaataatagctactttatcgccctgactttaggtatggccgccgtgacttttctgatccgattttcgttcatcggcctggccggaaaaatccagatgtccgaacgggtgaccaaaacgctgcgcttcgtcccggtcaccgtcctgccggccattatcaccattcagatccttagcgtgaattccagcatggagttcgatttaaagaatccgaaggtgatcgccgccattatctgcacgctcgccagcttccgtttaggcctggtgtgggtggtggtgagcggcgtcggctcgttggtgttgttgaattactttatgtaaccgtttgaaggataacccgtatgattattaccaccgctgacgcgcctgccgctatcggcccgtacgtgcagggcgtcaatctcggcgcgatgaccatcacctccggtcagctgccgattaatccgctggacggcaccatgcccagcgatatcgccgaacaggcgcggcaatcgctggaaaatgtgaaagccatcgttgaagcagccggactcacggtcgggcagattgttaaaaccacggtgtttgtcaaagacctgcaggattttgccgccatcaacgccgcctatgaggccttctttaccgaacatcaggccgcctttccggcgcgctcctgcgtggaggtcgcaagactgccgaaagacgccggcgtcgaaatcgaagccatcgccttctctcgttaatctcctggctgggggaaaacctccagcctccttcccaccgtttttcgccgttcctccttgctcattttacaggcactatacgatgagatctgaacgaggaacgcagcatgttaactatccgtaaggctgtagcagaagatgcgccgcagcttagtactatgggcaatgccagctatcgccaccacttcgcccacctttggcgtaatgccgatgagctggcattatttctccagcaggagtattccgtggaatcgctgcgtcaaagtcttgccgcggcggaacagcactggatcatcgccgaatcctcacaccccgttggcttcgccaaatacagctatcagcagcgaattgatggcgatggacgtatcggcacattgctgcataagctctatctgatgcctgacgaaaccggacaccgctacggcgagcggctgtttagcgccatagaggctatggcaaaagaaaatggtgaagcgtggctgtggcttgaggtccttgcagataatcctggcgcgcgtcgtttttacgaacgccagggaatgaagcatgtaaaagacaccacttttcattccgccagccaacaaagcaccttacatgttctggccaaaccgatttgagagaaattatgtctgagcttcgcgataccggcgttcgcaacgtcatctgcggcgaaaacgtggtcatataccagcccgccaacctctatgattgccagcttggcgataacgtctttgtcgggccgttcgtcgagattcaggggcacacgcgcatcggggcggacagcaaaatccagtcccacagttttatctgcgagtacgtcaccatcggccaacgttgttttatcggccacggcgtgatgttcgccaacgacatgttccgcgatggcaaaccgaatgccgaccgcgacagttgggggcggattgaaatcggcaatgacgtgtctatcggcagcggcgccaccattctggcggtgagtatctgcgatggcgtggtcatcggagccgggagcgtggtgacaaaatccatcaccgagaaaggcgtttgggcgggcaacccggcaaggctgctgcggcggctataaataaaaatgccgacccgagggtcggcattcaggcttaattgcgcagcgcttatgcgcgccaggctttataacggttaatcaagccgttggtagagctgtcgtggctgctgacgtccgcaccatctttcagttccggcaggatacggttagccagctgtttacccagctcaacgccccactgatcgaaggtgaagatgttgaggatcgcgccctgggtgaagattttgtgctcatacagcgcaatcaatgcgcccaggctgaacggggtaatttcacgcagcaggatagagttggtcggacggttgccttcaaacactttgaacggcaccacgtgctcaagctgagccgggtctttaccctgatcgcgatattcctgctcaaccacttcgcgagattttccaaaggccagcgcttcagtctgggcgaagaagttagacagcagtttctgatggtggtcagacagtgggttatgggtgatagctggggcgatgaaatcgcacggtaccattttggtgccctggtggatcaactgatagaacgcgtgctggccgttagtccccggctcgccccagatgataggtccagtctggtaatccacgacgttgccgttacggtcaacgtacttaccattggattccatgttgccctgctggaagtaagcggcaaagcgatgcatgtactgatcgtacggcagaatcgcttcggtttcggcaccgaagaaattgttgtaccagataccaatcagcgccagcagtaccggcaggtttttctcagccggcgtggtggagaagtgtttgtccatggcgtgggcgccggacagcagctgaacgaagttatcgaagccaacggacagaataatagacaggccaatggcggaccacagggagtaacgaccgccgacccagtcccagaattcaaacatgttagccgtatcgataccgaactcgccaaccgctttaccgttggtggagagcgccgcgaagtgtttcgccacgtgtttctcgtcgcccgctgtcgccaggaaccagtcacgcgcgctatgggcgttggtcatggtttcctgagtggtgaaggttttagaagccaccaggaacagcgtggtttccggattcaccgctttcagcacttcggcaatatgagtgccgtcaacgttagaaacgaagtgcatgttgagatgatttttatacgggcgcagcgcttcggtcaccatgaacgggccaagatctgaaccgccgataccgatgttcaccacgtcggtgatcggtttgccggtatagcctttccagttgccggagataatcgcttctgagaaggctttcatcttctccagcaccgcattgacttccggcatgacatctttgccgtcaaccacaatcggcgtattgctacggttgcgcagcgcgacgtgcagtaccgcacggtcttcggtacggttaattttttcgccggagaacatcgacttgatagcgccggccagatcggtctctttcgccagatcctgcagcttagacagcgtctcttcagtgatgcggttcttggagaagtccaccagcatcagatcgtcaaaagtggcggagaatttagagaaacgatcgctatctttggcgaaaagctcgctgatagtgacgtctttcatttcatcgaagtgtttctgtaatgcctgccatgcagcggtctgcgttgggttgatatttttcattagcaatactcttctgatttgaaaaatgtgacttcggtcgattgtagcctcagcggcggaaaattgtgatgatttttgtgttatgccgttgacggggtcagaaatagggtaaagagctcccatattatagcgatcattaggcttttttctgttattcgccaatgcatgaaaaatccgcataaccctgtcgttgacatactcgtcaggaagcctttatatagctgaactgcctacggaaccgtaggtatgtattgctcgcgcatttcacgctacagcgaagagtatcgctggggggtataatgaccagtctcccccaggcatagtgaaagacgtcagtaattgccagaagaggtgcgttgcccaggtaaccgtattggaggaaccagtccggggaaaatacgtgagggggagcaacgccgaggcgcacaggcatctggttaagtctgtcgccggccacaggggctgaatcccctgggttgtcaccagaaacgttcgcagtcgggcgtttcatactcgcgaaccgatgcgcgtcatcggcgaacgggtctacaaggtggagcacttctgggtgacatcgtagtttgtttatcgctctgcgcccaccctacttttcgctcttcccttgtgccatggctgagttaatttggcctggcttattaagacattttgtagcgctccggttatttccagcccgaaccaggagcggtcgttcaggaatcgttttaataagtcaggccccctgacacgaggttgttatgacagatttagttgttgctaagttcggcggcaccagcgtggccgatttcgacgcgatgaatcgtagcgtcgacgtcgcgctgctggatgcgaatacccgcgtagtggtgttatccgcatcggctggcgttaccaatatcttagttgctttagcggcagggctggaacccaccgaacgcttcgctaagctcgatgaaatgcgccaaatccagttcaatattctggaacgtttacgttatcccaacgttatccgtgaagaaattgaacgcctgctggaaaacattaccaccctggcggaagccgcctcgctggccagttcggaagccttgaccgatgagctggtgagccacggcgaactgatgtccaccttactgttcgttgagatcctgcgcgaacgtggtatcgcggcgcagtggtttgacgtacgtaaagtgatgcgcaccaacgatcgtttcggccgtgccgaaccggatgtcgccgcgctggcggaactgacgcaacagcaactggcgccgcggctggaagaaggcctggtcattacccagggctttatcggcagtgaagccaaaggccgcaccaccacccttggccgcggcggcagcgactatactgccgcgctgctcggcgaagccttaaacgccagccgtgtggatatctggaccgatgtccctggcatctacacaaccgaccctcgcgtcgcgccagcggcgaaacgcatcgatgtgatcgctttcgctgaagccgcggagatggccacttttggggccaaggtactgcatccggccaccctgctgccggccgtacgcagtgatatcccggtattcgtcggttccagcaaagaacctaaagccggcggcacgacggtctgtcataaaactgaaaatccaccgctgttccgcgcgctggcgctgcgtcgtcgtcagacgctactgaccctgcacagcctgcacatgctgcactcccgcggcttccttgctgaagtgttcggtattctggcgcggcataatatttccgtcgatctgatcaccacctcggaagtgagcattgcgctgaccatggacaccaccggttcaacctccgctagcgacaccctgctgacccaggcgctgctgaccgaactctcttcgctgtgccgcgtcgaagtggaagaaaacctggcgctggtcgccctgatcggcaatgaattatcgaaagcctgcggcgttggtaaagaggtattcggcgtattggaaccgttcaatatccgcatgatctgttacggcgcatccagccacaacctgtgtttcctggtgccgggcaacgatgcggagaaagtggtgcagaagctgcatcataatttgtttgaataatattcttttgcgcgataaaaaatacctatagccgggctcgaacccggcttttttataacaacaccaacacaacaaacactgtcgcaaggaatacactatgctcgccacgcttacgcggctgttcccgttatgggcgctgctgctctccgtattggcttattacacgccaaccacttttacccctatcggcccgtgggtcaccacgctgctgatgctgattatgttcggcatgggcgtccatttgaagctggacgattttaagcgcgtgctgtcacgtccggcgccggtcgcggcgggaatttttctgcattacctggtgatgccgctcgccgcctgggtactggcgctgctgttccacatgccgccagagctctccgccgggatggtgctggtcggcagcgtcgccagcggtacggcatccaacgtcatgatctacctggcgaaaggcgatgtcgcgctgtcggtaaccatctcttccgtttctacattggttggcgtggttgccacgccgctgctgacgcgtctgtacgttgatgcgcacattcaggtcgatgtgatgggcatgctgctaagcatcctgcaaatcgtggtgatcccaatcggcctcggtctgattgtccatcacctgttgccaaaagtggtaaaggcggtggaacccttccttcccgccttctccatgctgtgcatcctggcgattatcagcgccgtggtcgccggttccgcatcgcatatcgcttcggtaggcctggtggttatcgtggcggtgatcctgcataacgctattggcctgctcggcgggtactggggcgggcgcctgttcggttttgatgaatccacctgccgcaccctggcgatcgaagtgggtatgcagaactccggcctcgccgcggccctcgggaaaatctacttcggcccgctggccgccctgcccggcgcgctgttctcggtatggcataacctttccggctcgctgctggcgggttactggtccggtaagccgacaaccaaaaaaggcaaccagcgctaatcgtatacgtccgggcaaatgtccggacgtgtcttccctccctttgcattctcgcaagggtaagctatcggtaattcatcgattgccgtacactgggttctctggtctgattgagggcaccaccatggcactcccccgcattacacaaaaagagatgaccgagcgcgaacagcgcgaattgaaaacgctgttggaccgcgcgcgtatcgcgcacggccgcccgctgagcaatgcggaaacgaacagcgtaaaaaaggaatatatcgataagctgatggcgctgcgcgaagcggaagcgaagaaagcccgccaggcgaaaaaacagcaggcttacaaagtagacaaagaggcgacattttcgtggtcggcgaatacgccgacccgcggcaggcgttagcggcctttctttttacgtcccggctgagcgaaacgtttaccgttcgaggccgggcggcctcctttatcgttggttttttccatcttcaccaccgggcgcttgatcccggcggtcgccgctttggccttcggtttagcttttggcttcgcttcggaagaggagttttcaatcagcttgaacaggtcgatcagctcatcatcggttaaatcgcgccactcacccagcggaatgcccgtcaggctaacgttcataatgcgcgtccgctccagcttcgtgacttcatagccgaaatgctcgcacatacgacggatctggcggtttaacccctgaaccagcgtgatgcggaacacgaacggcgcttctttcttgaccttacattttttggtcacggtaccgagaatcggcacccccgcgcccatgccacgaatgaaatcatcggtaaccggcttatcgacggtgaccagatactctttttcgtggtcgttgccggcgcgcaggattttgttgaccagatcgccatggttggtcaggaaaattaacccctgggagtctttatcgagacggccaatcgggaacacgcgtttgctgtggttcacgaagtcgacaatattatcgcgctcgccatcttcggtagtgctgacaatacctactggcttattcagcgcaatcagcaccaaatcatcggcttctcgtggctcaatcagctgaccgttgactttcaccacatcacccggcttcacctgatcgccaatggcggcgcgcttaccgttgataaagacgttgccttgttcaataaagcggtccgcttcgcgacgcgagcaaatcccgctttcgctgatgtatttatttaatcgagtagatgagtcggtcagcatagtttctcctttgacagcgaaatatacctcaccttactagcgataaaaaacagggatgacgttattcattacccattgattgaggaaattagcgatatcatcgatacgctgttcggcaatgcctgcttcacgggccatctcctgttgcgcttcctcgctgatctcctcgttattcattaagcgcgtaatcagcagttggaagtaatgcgccagacaatcgcgctcggaatcttttactgcttctgcgcactccgtcgagtactcatccacgatgtcataatatttcagcggtatttcattgttcataggtcgtctccggggagttagcatctgcatttttcggccccgataataacattcagcttgcctgcaccgtgagccatatcagcgccccgacgccgggccaatgatagaatctgcgtcaaatgacatgcttacacaggatgaaaagatggaactgctgttactgagtaactcaacgctaccgggcaaagcctggatggaacatgcgctgccgctgattgccggccaggtcaaaggccgccgttcggcggtatttattcccttcgccggggtgacgcaaagttgggatgattacaccgccaaagccgccgccgtcatggcgcctatgggcgtcagcgtgaccggtattcacagcgtcgccgaccctatcgccgccattgaaaacaccgagatggtcatcgtcggcggcgggaacaccttccagcttctgaaagagtgccgcagccgcgggctgctggcgccgattgtcgatgtcgtcaagcgcggggcgttgtatatcggctggagcgcgggttctaacctcgcctgcccgaccattcgcaccaccaacgatatgccgattgtcgatcctcaggggtttgacgcgttagggctgttcccgctgcagattaacccgcacttcaccaacgcgctgccgaccgggcatcagggtgagacccgcgagcaacgtattcgcgaattgctggtcgtggcgccggaattaacggtgattggcctgccagaggggaactggattcaggtcagcgacggacacgccacgctcggcggcccaaacccgacgctgttgttcaaagcgggagaagaagcggtaaccctggccgcgggacaccgtttctaggctggtttggcgaacattacccggatagcggcgtgttgcgccttatccgggctaccctgcgtaaatcccgctaataatcatcccgctcgtcgtcttcatccggctgctccatcacgctataagcaacagcgcagaacagcgagttcaaacgcttcatatcgcccagcagcgccagatgcaacgtactggtttcaatactctgcacgttttgctgatgcaggcggtcaacatgcgcgtgcgagtaacggcggttaagaatacgaaaacggtgcttactgcggcgcaaccgacgggcgctcggcacgtcgccggaaaagaagaccgacattgccagctgcaggttactgagcagtagctcgtataacgcatccagctcttttagcccctcgacggaaaatgcgcgccgcgccgccagagatttatcggcgatttcgctgcccattcgctcgacgatgtcagacgcctgctccaggttgagcgacatctcgataatttccgcccagcggcgcgactcctcttccgccagctcgtccttcggcatccgcgccagataaagcttaatcgccgtatacagcacgttgatatcgtctgccatccgccgcagctctttctcttcgcgcggctcgccgtgcatcaccttgcgcaggctttccagcatctgctccatggcgtcgccgatacgtagggtttcacgcgcggcattggccaacgccaatgccggcgtatccaacgccgagggatccagatgcttcggcttgagatggttatccagctccggctcatcgcggatcaggcgtttacacaggttcgccatcggcccggcgaatggcaccatcgccacacagcgaatcaggttgtagaagacgtggaagtagatgaccagctccgactcttccagcggcaatttgtgcatgacatccgccagtacgtgcacaaatggcaaaattatcaagctccccaccagcttgaacagcaggctgccaagcgccacccgccgcgccgccgcgttggcgccgctgttgttaagcatcgccagcaggcctgagccaaggttagcgccgatgaccagacatagcgccaccgggaaagagatcaccccggtgccggttaacgttgcggtcagcagcacggccgccaggctggagtaactgataatggcgaacactgcgccaatcagcgcatccagcatgatatcgccggtcagcgaggcgaaaatcacctgaacgccgttggcctgggtaatcggatgcaccgcctggacgatgagctccagcgccagcaggataagcccaaggccgatccccacccgcccaagctgacccgcacgggtttgtttacgcccgaggaagaaaataacgccgataaatatcagcagcggcgacaaccaggagaggtcgaaggtcagtaccctcgccatcagcgccgtccccacatccgcacccagcaccatgaccagcgctggcgccagcgcgaccagatcctgggccacaaacgacgtcaccagcatggtggtggcgttactgctctgcaccagcgcggtgacgccaatccccgcgcagaaggcgagcggttttttctccacgctgctgctgagcacggtacgcaggcgtgcgccaaagacgcgcatcacgccagtgcgcacaatatgggtgccccacaccagtagggctacggcggaaagtaggtgtaacagcgttaacacagaatcagcttctccttatcgttataggtgttcctgaggtttaaacctcccttcagtataaggggttaacttcaataaagagacaaggcgctcaaagagcgccctgtttgttgtaacgaaaaatattcgttagtcagcatcataaccgaggttaggggcgagccaacgctcaacttcggccgccgtcatccctttacgctgagcgtaatcttccacctggtcgcgctggatctgcgctacggcgaagtacttgctgtccggatggctgaagtaccagccggaaaccgatgcgccaggccacatggcgaaggactcggtgagcttcatgccggtatgcgattccacatccaacagttcccagatggtcgctttctcggtatgttccggacaggccggataaccgggcgccgggcggatcccctggtaattttcgcggatcagctcttcattgctgaggttctcattggccgcatagccccagtaaaccttacgcactttctcatgcagatactcggcgaaggcctccgccagacggtcggcgatggccttaaccatgatcttgttatagtcgtcgtgctgcgcttcataggcttccgccagcgcgtcttcttccagcccgccggtcaccgcgaaagccccgatgtagtccgctttaccgcttagcttcggcgcgacaaaatcggcgaggcagtagttcgcgaagccgaccttttcagtttgctggcgcaggtgatggctgaccgtcagcacgtgggtgcgggtttcatcgcgatagatttccacgtcgtcgccaacgcggttggccgggaacagcccgaccacgccgcgcgggttgagcgttttttcggcgctgagtttatccagcaaatcgttggcgtctttaaacaggcgctgcgcctcttcacccaccacttcatcttccaggatacgcggatatttacccgccagcgaccaggtcataaagaacggcgtccagtcgatgtagttacgcaacgtttcgatgctggcttccacctcctgcacgcccaggcgatgggccaccggcggagtgtagctctcccaatcaaacgccagatcgttttcccgcgccgcctgcagagtcacaggcggcgtgcgcggctttttacgcccgtgctggattcgcacggtttcatactctttacgggtacgggcgacaaaatcatcgcgctgggttgccgacagcagggctgaaaccactcctacggtacgcgaggcgttctgcacgtagaccgtcgggccactgtagttctgttcgattttcaccgcggtatgggctttcgaggtcgtcgctccgccaatcagcagcgggatggtaaagccctgacgctccatctctttcgccacgttgaccatttcgtccagcgacggcgtgataagcccggagagaccaatcagatcggcgttttcttcgcgcgcggtacgcaggattttctctgccggcaccatcacaccgagatcgataatttcgtagttgttgcactgcagcactacgccgacgatgtttttaccaatatcgtgtacatcgcccttcacggtggcgatcaccatcttaccgttgctggagccctgttctttgctggcttcgatgtaaggttcgaggtaggccaccgcctgtttcatcacccgcgcggattttaccacctgcggcaagaacattttcccttcgccgaacagatcgccgaccacgttcatgccgtccatcagcggcccttcaatcacctcaatcgggcgttcggcctgctggcgcgcctcttccgtatcctgctcgataaattcggtaattcctttgaccaacgagtattcaagacgctttttcacgtcccagctgcgccattccgcctgctgagcgttagcgccgtcgtccactttgctgccgcgatatttttccgccagctcaagcaatctttcggtactgtcatcgcggcggttaaggatcacatcttcaaccgcgtcgcgtagctcgccaggcagatcgtcgtatatcgccagctggccggcattgacgatgcccatatccataccgttgcggatagcgtagtagaggaagacggcgtggatcgcttcacgtaccggatcgttaccgcggaacgagaacgacacgttggagacgccgccggaaatcagcgcatgcggcagctcgcgtttgatgtcttcgcaggcgccgataaagtcctgagcgtagttgttgtgctcttcaataccggtagcgacggcaaaaatgttggggtcgaagatgatatcttccggcgggaagccgacctcttcggtgaggattttgtaggcgcgacggcaaatttcgattttgcgctcgcgggtatcggcctggcctacttcatcaaaggccatgactaccattgccgcgccatagcggcgaaccagcttagcgtgatgaataaagggttcgacgccctctttcatcgagatcgagttaacgatgcccttgccctgaatgcacttgagtcctttttcgatgacttcccacttggaggagtcgatcataatcggcacgcgggcaatatccggttcacccgctatcaggttgaggaaacgtaccatcgccgcttcggcatcgagcatcccctcatccatgttgatatcgataatttgcgcgccgctttccacctgctgacgtgccacgtccagcgcttcgctgtacttctcttctttgatcaggcgcttaaatttagcggagccggtgacgttggtccgctcgcccacgttgacgaacagactatcatcgccgatgttcagcggctcaagccccgatagacggcaggcgaccggcagttccagcagctggcgcggcggcaagccttctaccgcccggctcatggcggcgatatgttccggagtggtgccgcagcaaccgccgacgatattaaggaaaccagcctgcgcccattcgcgtatttgcgccgccatggtgtcggcatccaaatcgtattcgccgaaggcgttcggcaggccggcgttcgggtgcgcggtaacgtagcattcggcgatccgcgaaagctcttgcacgtactggcgcagctcatccggccccagcgcgcagttcaggccgaaggtcagggcatcggcgtggcgcagcgaattatagaacgcttcggtcgtctgcccggacagtgtacgcccggaggcatcggtgatagtgccggaaatcataatcggcagctcgacgccgagcgcctcaaattcttctttgaccgcgaaaatcgccgctttggcgttcagggtgtcaaagaccgtttctataagaatgagatccgagccgccttccaccagcgctttggtggattcacgataggcggccaccagctgatcgaatgtgatattccgaaatgccggatcgttgacgtccggagaaatagaagcggtgcggttggtcggcccgagcacccccgccacatagcgcggtttttccggcgtacgcgcggtccacgcatcggcgctggcgcgggccagcttcgcggcggcaaagttaatttccgccgacagggattccatttggtaatccgccatcgcgatggttgtcgagttgaaggtgttggtctcgataatgtccgcgccggcggcgaaataggcgtcgtggatctcgcgaataacctcaggcttgctgaggaccagcaggtcgttattgcctttcaggtcgcacggccaatcggcaaagcgttcaccgcggaaatcctgctcactcagacgatagccctggatcatggtgcccatgccccgtccagaaccagaatgcgttctcttaactgctgatgtaattgttctactttgttactcacacagactcccgacagcgctcaactcagaccaaaaagccaacaaaccatactgtcataaaccaacctgccggaaaaggaaacctgcagcaacatgagacaagttcaacttcactcctccgatcagtctggttgtgattgcattatcgccaaataaaacgaaaatcatttccacgatacagaaaaaaggagttcatcatggctaccccggttcccgccaaacgcggcagaaaacccgccgctgccgcccctgccgcgcaggctggcgggcaagtgcagtcgcttacccgcggtttgaaactgcttgaatggatttctgaatcgcatagcagcgtcgcgctcaccgaactggcgcagcaggcggggctacctaactccacgacccatcgtctgctcaccaccatgcagcagctcggttttgtgcgccaggtcggcgagctggggcactgggcgattggcgcgcatgcgtttgtcgtcggcagcagcttcctgcaaagccgcaatctgctggccatcgtccatcctattctgcgccagctgatggaagattccggcgaaacggtcaacctggcggtgctggataaaagcgatcatcaggcgattatcatcgaccaggtgcaatgtacgcagctgatgcgcatgtcggcgccgattggcggcaaattgccgatgcacgcgtcaggcgccggaaaagcgtttctgtcgcagttgagcgaagaagaggtcaccacgctgctacatcggaaagggctgcacgcttacacccacgccaccctggtttctccggtacatttgaaagaggatttggcccaaacgcgtaaacgcggctattcatttgatgatgaagaacatgcgctggggctgcgctgtatcgcctcctgcatttacgacgaacaccgcgagccgttcgccgctatctccatctccgggccgatttcgcgcatgaccgatgaccgggtgaccgagcttggcgcattggtcattaaggccgccaaggaagtcacgttggcatacggcggggttaaataataaaaatgccccagaggggcattttaagtaggcctgataagcgtagcgccatcaggcagatcggcgcaccttgccggatggcggcgtaaacgccttatccggcctactgtcggcgccatagcgcacgctaaaacgctgcttacgccggtaagcgtaaacatcttccacgtgcccgtttttaattcgcgtctgtaattcgcgccagtaatcggcacgcagcaaatccgcgtgcatctcctccagtagcggcccgatccgcggatcggcgcacaaccagtgacggaactcttccgggaagacatcgccaggggacacgctataccagggttcactagccagctcatcttccggatagcgcggcggcggaatatcgcggaaattcacttcggtcatgtagcaaatttcatcgtaatcgtagaatactacccgcccgtggcgcgtgacgccgaagtttttgaacagcatgtcgccggggaagatattggcggccgccagttggcgaatggcattaccatactcttctaccgcgtcgcgcagcgcctggccttccacctgctccagccagatattgagcggcaccatccgtcgttcaatataaagatggctgatggcaatgcgatcgccgaggtcggtcaacttatttcccgcttccgcctgcaacagcgtcatcagctcgggcgcaatttgccgcttatcgagcacaaagttttcaaattcctgagtatccgccatccgtccgacgcggtcgtgttctttgaccaactgatagcaggcgcggacgtgggcggcagtcatctctttttgcggcgcaaagcggtctttaatcaccttaaatacccggtcgaatcccggcagggtaaagaccaacatcaccatcccacggatgcctggagcttcaataaactgctcatcgctgcgggtaacatagtgcaggtactcgcgataactttccgttttagcatgcttctggcagccaatcgccatatatagctcggcggtagtttttcccggcagaatctcgcgcagccattcaaccagcgccgcgggcagcggcgcgtagaccatgaaataggagcgggcgaaaccaaagacgatactcgcctcggcgtgggtcgtcaggcaggtatccacaaacagctgcccgtcatcgctgcgatgtatcggcagcaggaacggcagcgtcgccatcggcgtaatcagtttacctaccagccaggcggctttattacgataaaaaagctcattcgccacctgcagatgcgactgcgacagcaactcgccgccaagtgcttcgcgtaaatgactgacgatataaccgatatcacgccctttgttttgccacggcagtcgcagcggcaaatcggcaagcaggttatgcatcaggtattcccagccgcgttcgggataaaagtccttcgccagcggtcgcgaaatcgtgcgaaaacgacgttccggctgggagctgaaaataaagagccgctcgggggtcagcgagcggtggtcaaacagtcggcagtagaccgagttgaaaaagctctccgcaatttcaaagcgagggtaatccggcaaaagttgggtgtactgctgtttcacccgcagaagaaaatcgacgtcggtacttttcccttcggtaatacagcgcagctgttctaccaccagacccacgtggtgatcgtagaggtggatacgctgcttcatcgcctgctgcacggcgtgccagtcagcctgttcaaagcgctgctgcgcgccggaagtgacttccagaaaacgcccgtactgggcgtcaaatccctgtaaaatggtttgggcaatcagtaattccaggccacgcgtcatcgctttccccatccggcacaacatcatgccggatggcgcgttagcttatccggcctacacctttgcaggcccggtaagcgctgcgccaccgggcattgcttaaaactgcgattcttcggtcgagccggtcagcgccgttaccgacgaggttcctccctggataatagtggtcactttgtcgaagtacccggtacccacctcctgctgatgcgacacgaaggtgtagccttccggcccggcggcaaactccggctgctgaactttttcgacgtagtgacgcatgccttcaccctgcgcgtaggcgtgggccaggtcgaacatgttgaaccacatgctgtgaatacccgccagggtaatgaactggaatttatagcccatatccgaaagctgctgctggaagctggcgatggttttatcgtcgagatttttcttccagttaaaagatggcgagcagttataggccagcagcttgcccgggaagcgggcgtggatcgcctcggcgaaacggcgtgcctgttcaatgtccggtttagaggtttcacaccataccaggtcagcgtaaggggcgtaggccagaccgcggctaattgcctgttcgataccggcatgggtgcggtagaaaccttcgctggtgcgatcgccggagataaattcccgatcgtaaggatcgcaatccgaggtaatcaggtcagcggcatcagcgtcggtacgggcgataagcagcgtcggcacccccatcacatccgccgccaggcgcgcggcgaccagcttctgaatcgcctcttgcgtcggcaccagcaccttgccgcccatatgtccgcacttcttcaccgacgccagctgatcttcgaaatgcacggccgctgcaccggccgcaatcatcgatttcatcagctcaaaggcgttcagcacgccgccaaaaccggcttccgcatcggcgacgatcggcaggaaatagtcgataaaacgcggatcgttcggctcaatccccgccgcccactggatctgatcggcgcgacggaaggtgttgttgatccgatcaacaaccgatggcaccgagttagccgggtacaacgattgatccgggtacatactggaggccaggttggcgtcggcggcgacctgccagccagacaagtagatggcttcaatgcccgccttcgcctgctgcagcgcctggccgccggttaacgcgccaaggctgttgatataaccctttttcgcttcaccatgcagcagacgccacattttcgccgcgccaagctgcgccagcgtgcactccgggttcaccgagccgcgtaacttcaccacctcttccgcgctgtatgggcgggtaatgccttcccagcgcgggttcgtccactctttgtttaattcttcgatttgttgggtacgggttttcatgtgcagatgctccatattgtgatggggtgaattacgccagcaggcggtaacctggcaacgtcaagaagtcgatcagttcgtcggaagtggtgatttgctccatcagccgcgccgcatcgtcaaagcgaccgtggctgaagcggtgttcccccaactcttcctgaatcaccatcagctcttcagccagccactgacggaacagcgccttggtaaccggtgtgccgtcgttcagggttttctgatgatggatccactgccagatagaggtacgcgaaatctcagccgtcgccgcatcttccataaggccgtaaatcggtacgcagccgttgccggagatccaggcctcgatgtactgcaccgccacgcggatattggcgcgcatgccggcttcggtgcgctcaccctcgcagggagccagcaactgctcggcggtaatcggcgcgtcgtcattgcgggtaacaaacaactggttaggatgttcacccagtacgcggttaaagacatccattgccgtatccgccagtccaggatgcgcaatccaggtgccatcgtggccattgttagcctccagctctttatcggcggtgactttattcagcacctgacgattgcgctcggcgtctttgctcgggataaacgccgccataccgcccatcgcgaaggcgccgcgcttatggcaagtcttaatcagcaggcgtgaataggcgctcaggaaaggtttatccatcgtcaccacctggcgatccggcaggacacgatcggggtgatttttcagcgtcttgatatagctgaagatatagtcccagcgcccgcagttcaggccaacaatatggtcgcgcagcgcatgcaggatttcatccatctggaacactgccggcagcgtttcaatcagcaaagtagccttaatggtgccgcgcggcagttcaaaacgatcttcggtgaaactgaagactttgctccaccatgccgcctcttgccaggactgggttttcggcagatagaaataggggccgctccctttcgccagcagagcctggtagttgtggaagaaatagagcgcaaaatcgaacagactgccgggaatcgcctcaccacgccaggtaacgtgtttttccggcagatgcaggccgcgaacgcggcagaccagtaccgccggatcgggctgcaactgataaattttccccgcttcgttggtgtagctgatggtgccgttgaccgcatcacgcaggttgatttggccatcaatgactttgtgccaatccggcgccagcgagtcttcgaaatcagccataaagactttaacgttagcattcagggcgttaattaccatcttgcgttcaaccggaccggtgatttctacgcggcggtcttgtaaatcggccggaatacctcgtatcttccagtcaccattacgaatggaagccgtttccgaaataaaatcaggaagatttccatcatcaatggcctgctgttgctggacgcgtgctgccaacagttgattacgctcaggcgtaaaacggctcaccagttccgtcaggaactccaccgcttccgcagtcagaatttgcttctcctgctcgccataaggctggctgaaggccagttcatcggtcattgtcgcctgttgcgtcattgtgcagctcctcttgtttgatcctggtagcgcgaacgaaagatcgttgtctgcttttcgctcagcacaattaagactactcaagaattctccaaaatcaaaaacaatttccatttttaatggaaaattaacacaacatcttgataacaaagaaattaaagtttaaatagaaggggaagtgattttcggaaataaaaaaggcacccgaaggtgcctgaggcgagatgctgaaacgctttaggatcgtacgcgctggtagattaatccagtgttggattcatatgacgcagatcgtatggtgtgatttggtagacgtaatagttaagccagttggcaaacaggagattgccatgactgcgccatgtcgcccgcggtttattgtttggatcgttattcgggaagtagttttccgggagttgtggcgctaaaccagcctccagatcgcggaagtattcacttgccagggtatgtggatcgtattcagggtgaccggtaacaaaagcgatacgcttatctttgctggcgaacagataggcatcgccatcttcggtttcagcaagaatatcgaggtcggtgtagtcacgaatcagcccggccgggaagtcggcatagcgtgaatgaggcgcaaggaaggtgtcatcaaaaccgcgtgtcagcagggcatgcgggtgcaaaatatggtgttcataaacgccagagatcttttcggtacgagtttgcttggggataccataaagaatattcagcgccgcctgtaccgcccaacagacaaatagtgttgacgtgacgtgatccttagcccactccagtacctgtttgatctgtggccagtaggcgacatcgttaaattcaaccagccccaacggcgcgccggtaacaataagaccatcgaagttctgctcgcgaatgtcgtcaaagttgcagtaaaagttattcagatgctccgtcggcgtattacgcgactcacgcgcatcgatgcgtagcagttggatatcgacctgcagcggcgagttcgacagcagccgcaggaactgattttccgtctcgatcttctttggcataagattgagaattaacaccttcagcgggcggatttcctgagtggtggcacgcgatgtcgtcatcacgaagacgttttcatcgcgcaagaaattgacggccggtagctcgtcctgcacccgaattggcatagctgtatcaccccattacatacgtataaacgtttagacatccagatagctgacaataaccagaaataagcaaaatgtcgagtctgcaagtggaaggtgagaaagtttcaaggaggatttaagaggtgggattttcccgcaggcggcgcaggccggggaacgatcggcagccccggtaagcgcagcgccaccggggggtgccatcgtgtctggccacaaaacacaaaaacaaaaggcccagtcttccgactgagcctttcgttttatttgatgcctggcagttccctactctcacatggggagaccccacactaccatcggcgctacggcgtttcacttctgagttcggcatggggtcaggtgggaccaccgcgctgtcgccgccaggcaaattctgttttaccagcccgtcatatgacgcactgattaatctgtatcaggctgaaaatcgtctcaaatccgccaaaacagcttcggcgttgtaaggttaagcctcacggttcattagtatcggttagctcaacgtatcgctacgcttacacacccgacctatcaacgtcatcgtctttaacgttccttcaggactctcaaggagtcagggagaactcatctcggggcaagtttcgtgcttagatgctttcagcacttatctcttccgcatttagctaccgggcaatgccattggcatgacaacccgaacaccagtgatgcgtccactccggtcctctcgtactaggagcagccccctcaattctccagcgcccacggcagatagggaccgaactgtctcacgacgttctaaacccagctcgcgtaccactttaaatggcgaacagccatacccttgggacctacttcagccccaggatgtgatgagccgacatcgaggtgccaaacaccgccgtcgatatgaactcttgggcggtatcagcctgttatccccggagtaccttttatccgttgagcgatggcccttccattcagaaccaccggatcactatgacctgctttcgcacctgctcgcgccgtcacgctcgcagtcaagctagcttatgccattgcactaacctcctgatgtccgaccaggattagctaaccttcgtgctcctccgttactctttgggaggagaccgccccagtcaaactacccaccagacactgtccgcaaccccgatcagggccaacgttagaacatcaaacattaaagggtggtatttcaaggttggctccacgcagactggcgtccacgcttcaaagcctcccacctatcctacacatcaaggctcaatgttcagtgtcaagctatagtaaaggttcacggggtctttccgtcttgccgcgggtacactgcatcttcacagcgagttcaatttcactgagtctcgggtggagacagcctggccatcattacgccattcgtgcaggtcggaacttacccgacaaggaatttcgctaccttaggaccgttatagttacggccgccgtttaccggggcttcgatcaagagcttctccttacggataaccccatcaattaaccttccggcaccgggcaggcgtcacaccgtatacgtccactttcgtgtttgcacagtgctgtgtttttaataaacagttgcagccagctggtatcttcgactgatttcagctccacccgcagggcttcacctacatatcagcgtgccttctcccgaagttacggcaccattttgcctagttccttcacccgagttctctcaagcgccttggtattctctacctgaccacctgtgtcggtttggggtacgattcaatgttacctgatgcttagaggcttttcctggaagcagggcatttgttacttcagcaccgtagtgcctcgtcatcacacctcagcgttaaaaaggtaccggatttacctggaacctccgcctacatgcttaaaccgggacaaccgtcgcccggctaacatagccttctccnnnncccttcgcagtaacaccaagtacaggaatattaacctgtttcccatcgactacgcctttcggcctcgccttaggggtcgactcaccctgccccgattaacgttggacaggaacccttggtcttccggcgtgcgggcttttcacccgcattatcgttacttatgtcagcattcgcacttctgatacctccagcaaccctcacaggccaccttcgcaggcttacagaacgctcccctacccaacaacacatagtgtcgctgccgcagcttcggtgcacagtttagccccgttacatcttccgcgcaggccgactcgaccagtgagctattacgctttctttaaatgatggctgcttctaagccaacatcctggctgtctgtgccttcccacatcgtttcccacttaactgtgactttgggaccttagctggcggtctgggttgtttccctcttcacgacggacgttagcacccgccgtgtgtctcccgtgataacattcttcggtattcgtagtttgcatcgggttggtaagtcgggatgaccccctagccgaaacagtgctctaccccgaagatgaattcacgaggcgctacctaaatagctttcggggagaaccagctatctcccggtttgattggcctttcacccccagccacaagtcatccgctaatttttcaacattagtcggttcggtcctccagttagtgttacccaaccttcaacctgcccatggctagatcaccgggtttcgggtctataccctgcaacttaacgcccagttaagactcggtttccctgcggctcccctatacggttaaccttgctacagaatataagtcgctgacccattatacaaaaggtacgcagtcacaccctaaagggtgctcccactgcttgtacgtacacggtttcaggttctttttcactcccctcgccggggttcttttcgcctttccctcacggtactggttcactatcggtcagtcaggagtatttagccttggaggatggtccccccatattcagacaggataccacgtgtcccgccctactcttcgagttcacaacctgtgcattttggtgtacgggactatcaccctgtaccgtcggactttccagaccgttccactaacacacaagctgattcagactctgggctgctccccgttcgctcgccgctactggggaatctcggttgatttcttttcctcggggtacttagatgtttcagttcccccggttcgcctcgttaacctatgtattcagttaacgatagtgcaacgaattgcactgggtttccccattcggacatcgccggctgtaacggttcatatcaccttaccgacgcttttcgcagattagcacgtccttcatcgcctctgactgccagggcatccaccgtgtacgcttagtcgcttaacctcacaacccgaagatgtttcgtaaaacattttcgtgtcgcgaaaatttgagagactcgaacacacattaactgtgtgtcgtttcaattttcagcttgatccagatttttaaagagcaaatatctcaaacrtcacccgaagatgagttttgagatatatcggcacgcgtctttcactcacgaaccagcaagtggcgtcccctaggggattcgaacccctgttaccgccgtgaaagggcggtgtcctgggcctctagacgaaggggacactgaagtctcaatcgcaagacgccttgcttctttactttcatcagacaatctgtgtgagcactacaaaggcaggttctttaaggtaaggaggtgatccaaccgcaggttcccctacggttaccttgttacgacttcaccccagtcatgaatcacaaagtggtaagcgccctcccgaaggttaagctacctacttcttttgcaacccactcccatggtgtgacgggcggtgtgtacaaggcccgggaacgtattcaccgtagcattctgatctacgattactagcgattccgacttcatggagtcgagttgcagactccaatccggactacgacatactttatgaggtccgcttgctctcgcgaggtcgcttctctttgtatatgccattgtagcacgtgtgtagccctactcgtaagggccatgatgacttgacgtcatccccaccttcctccagtttatcactggcagtctcctttgagttcccggcctaaccgctggcaacaaaggataagggttgcgctcgttgcgggacttaacccaacatttcacaacacgagctgacgacagccatgcagcacctgtctcagagttcccgaaggcaccaaagcatctctgctaagttctctggatgtcaagagtaggtaaggttcttcgcgttgcatcgaattaaaccacatgctccaccgcttgtgcgggcccccgtcaattcatttgagttttaaccttgcggccgtactccccaggcggtcgacttaacgcgttagctccggaagccacgcctcaagggcacaacctccaagtcgacatcgtttacggcgtggactaccagggtatctaatcctgtttgctccccacgctttcgcacctgagcgtcagtctttgtccagggggccgccttcgccaccggtattcctccagatctctacgcatttcaccgctacacctggaattctaccccctctacaagactctagcctgccagtttcgaatgcagttcccaggttgagcccggggatttcacatccgacttgacagaccgcctgcgtgcgctttacgcccagtaattccgattaacgcttgcaccctccgtattaccgcggctgctggcacggagttagccggtgcttcttctgcgagtaacgtcaatcgccaaggttattaaccttaacgccttcctcctcgctgaaagtactttacaacccgaaggccttcttcatacacgcggcatggctgcatcaggcttgcgcccattgtgcaatattccccactgctgcctcccgtaggagtctggaccgtgtctcagttccagtgtggctggtcatcctctcagaccagctagggatcgtcgcctaggtgagccattaccccacctactagctaatcccatctgggcacatctgatggcatgaggcccgaaggtcccccactttggtcttgcgacgttatgcggtattagctaccgtttccagtagttatccccctccatcaggcagtttcccagacattactcacccgtccgccgctcgtcacccgagagcaagctctctgtgctaccgctcgacttgcatgtgttaggcctgccgccagcgttcaatctgagccatgatcaaactcttcaatttaagtttgatgctcgtgaattaaacttcgtaatgaattacgtatgttcactcagagacttggtattcatttttcgtccgaggacgttaagaatccatgtcactttgagtgcccacacagattgtctgataaattgttaaagagcagttgcgacgcgctttagcgctctgtcgcgaggtggcgtatattacgctttcctctttcagagtcaaccctgaatttcagaatttttctcttcaaccgaaccggctgtttgtgtgaagtgattcacatccgccgtgtcgatggaggcgcattatagggagttctcgaacgcctgcaatagaaaaattgcagaaaaatgactgactgctgcattccccagcaaaaccccgctttatacccttttacgcacagaattatccacaggagcacggcaaaacacggctaaaaccccggtgcatccactgccatataaggagagaaccaccggctaaaagagaaagataaaaattcgcgagcgttgcgcaaacgttttcgttacaatgccgcgctatgacacggatgcccggttgggtgcgttaggtgagtttttaggcaaaaactcacctaacgctctctgtaatgttcaaatcctggggatttaataccatgcaacaacgtcgtccagtccgccgcgctctgctcagtgtttctgacaaggccggtatcgtcgaattcgcgcaggcgctttccgctcgtggtgtcgagctgctgtccaccggcggcaccgctcgcctgctggcagataaaggcctgccggttaccgaagtctctgactacaccggtttcccggaaatgatggatggacgcgtgaagaccctgcatccgaaagtacacggcggcatcctcggtcgtcgcggtcaggatgacggtatcatgcagcaacacggtatcgcgcctatcgatatggttgtcgttaacctttatccgtttgcccagaccgtcgctcgtgaagggtgttcgctggaagacgcggtggaaaacatcgatatcggcggcccgaccatggtgcgctctgcggcgaagaaccataaagatgtcgccatcgtggttaagagcagcgactacgacgccatcattaatgagatggacgccaacgaaggttccctcacgctggacacccgcttcgacctcgccattaaagccttcgaacacaccgccgcttacgacagcatgatcgctaactacttcggcagcatggttccggcctatcacggtgaaagcaaagaagccgctggccgcttcccgcgtaccctgaatctgaacttcattaagaagcaggatatgcgctacggcgaaaacagccaccagcaggcggccttctatatagaagagaatgtaaaagaagcctcagtggctaccgccacccagctgcagggcaaagcgctctcctataacaacattgccgataccgacgcggcgctggagtgcgtgaaagagtttaacgaaccggcctgtgttatcgtcaagcatgccaacccatgcggcgttgccgttagcgactcgatcctcgacgcctacgatcgcgcatacaaaaccgacccaacctccgcgttcggcggcatcatcgcctttaaccgcgagctggatgctgaaaccgcgcaggcgatcatctctcgccagttcgtcgaagtgatcatcgcgccatccgctagcgaagaagcgctgaaaatcaccgccgctaagcagaacgtccgcgtactggtctgcggccaatgggatgctcgcgtcgcgggtctcgatttcaaacgtgtcaatggcggcctgctggttcaggaccgcgatctcggtatggtcaccgcgggcgaactgcgcgtggttagcaaacgtcagccgagcgagcaagagctgcgcgatgcgctgttctgctggaaagtggcgaaattcgtcaaatccaatgccatcgtatatgccaaagataatatgaccatcggtataggcgccggtcagatgagccgcgtctactcagcgaaaattgccgggattaaagccggtgacgaaggtctggaagtgaaaggctccgccatggcttctgacgccttcttcccgttccgcgacggcattgatgccgcagccgcagtaggcatcacctgcgttatccaaccgggcggctctatccgcgacgaagaagtgattgccgccgcggacgaacatggtatcgccatgatcttcaccgacatgcgccacttccgccattaattcacggagcagcagatgaaagtattagtaatcggcaacggcgggcgcgaacacgcgctggcctggaaagcggcccagtcgccgctggttgataccgtctatgtcgcgccgggcaacgcgggtaccgcgctggagccggcgctgcaaaacgtcgccatcggcgtcaccgatattccggccctgctacgcttcgcgcaggatgagaaaatcgatctgacgatcgtgggtccggaagcgcctctggtcattggcgtagtagacgcattccgtgccgcagggctcgccatcttcgggccaaccgaaggcgccgcgcagctggaaggttcaaaagccttcaccaaagatttcctcgctcgtcatcatatcccgacggcggaataccagaacttcaccgaagttgagcctgcgctggcttatctgcgggagaaaggcgcgccgatcgtcatcaaagccgacggtctggcggcaggtaaaggcgttatcgtggcgatgacccttgaggaagccgaagcggcggtcaaagatatgctggccggtaacgcctttggcgatgcaggccaccgcatcgtgattgaagagttcctcgatggcgaagaagccagctttattgtcatggtcgacggcgagcacgtcctgccgatggccaccagccaggatcacaagcgcgtcggcaacggcgataccggcccgaacaccggcggtatgggcgcttactccccggcgccggtggttactgatgaagtccatcagcgcaccatggagcggattatctggccaaccgttaaaggtatggccgctgaaggaaacacctataccggtttcctgtatgccggtctgatgatcgacaagcagggcaatccgaaggttattgagttcaactgccgctttggcgatccggaaactcagccgatcatgctgcgtatgaaatccgatctggtcgagctgtgccttgccgcctgcgcgggcaagctggacgagaagacctccgagtgggatgaccgcgcttcgctgggcgtcgtggttgccgccggcggctatccgggcaactacaacacgggcgatgagatccacggcctgccgcagcaggaagcggcagacggtaaagtcttccacgccggcaccaaactggcagacgaccagcgcgtggtcaccaacggcgggcgcgtgctgtgcgtgaccgcgctgggtgaaaccgtggcgcaggcgcaacaacgcgcctatgaactgctgaccgatattcactggaacggcagcttcagccgcaacgatatcggctggcgcgccatcgcgcgtgagaaaactaacggctgagttttgccagcagcgttttgcgcgtaatgcctaactgacgggcggcttcagttttgttgccgcccgttttttccagcgccgccagaatgacctctttttcgacttccactaaaggctgaatcaacgcctcatcgccaccacagaccggcagcgtcgtgcccgctatcgccaacggcagttcacgctcggaaatgtagtctccggtcagtagcaccaccgcccgctccaccgcattttccagttcgcgaatatttcccggccagccgtagtgaatcaacaggtccatcgcttgcggcgtaaatccctgcaccgttttacgattgcgttcggcatagcgcttaagaaagtgctgcgccagttgcggaatatcttcacgccgctgacgcagcggcggcatatcaatagttacgacattcaggcggtaatagagatcctggcgaaaacgcccggcgctcacctcctccgccagattacgatgggtggcggcgattagccgcacatcgacagaaagcgtctgattactgccaactcgctgcacttcgcgttcctgaatcgcccgcagcagacgcacctgcatcagcggcgaaatatcgccaatttcatcaaggaacagcgtgccgccatccgcctcgacaaaacgcccttcccgccgccgttccgcgccggtaaaagctcctttttcatggccgaacagctcggattccagcagcgactcattgagcgctgcgcagtttagcgtcaccagcggcttgtcgcggcgctcgctgcaggcgtgaatggcgcgcgctaccagttctttaccggttcccgattcgccgcagatcagcaccgtcgcgtccgagggcgccaccagcgtaatattgttgataagcgcctgcattgccgggctatcgccaatcatgccccatcgtaattctgtcgcgccgctgaaatcgccctcgctctgccgggtgtgcgccagcgcctgaaccagcgtctgctgtagggtgtcaaaatccagtggcttgaccagataatccagcgcgccggacttaatagcctcaaccgccgtgccgacgctggagaacgccgtcatgatcaataccggaatcgccgggttataggctttgatctcttttaatgtcgcgataccgtccatctccgccatgcggatatcgcacagcaccagatcgaagacctgccgatggatctgctccagcgcctgcagaccgttgttagctaacgccactcgatagccccagccacgcagcagcgcctgcagaattgtgcagtggctgacgtcatcatcgacaaccagaatctgtactttatcgctgctcatcttccctccgttgagcatccaccggtagccaaagcgtaaatatcgctccggccccggctggctttcggcgcggattgtcccgccatgttgttcgataatattctgtaccaccgccagccccagccccgtgccgtccgccttggtggtgaaataaggggtaaagatggcctgtagctcttcatcgctcatccccttaccgctatccttaacgacaattttcacacgtcgccgatcggcttcacttgccgatacgtgaatgacgccgtcgcggccaatagcctgcatcgcgttcagatacagattcaacagcacctggttcagacggtcggggtcggctttaatcgaggttaattcaggacgcggagtaaattgcagcgcgatcccgcgactctgcgcatcctggcttaccagctgcaatgagtgatggataagcgcgttaatatcgaccggctggtagtttaaatgggcagggcgaaccagctccagcaactcgctgacgacccggttcaggcggtcggcctctttggccatcaccagcgctaactcctgcgcctcgccgcccggcggcgtacgctcggcaaaatactttgccagtcctttaatcgaagagagcgggttgcggatctcatgcgcgacaccagccgccagatgcccaagggccatcagtttttctttgcgggccatcgcctcctgtagctgctggcgtgagagacggtagcggcggaaccagaactgagcgaggatcgtcgcgacgatgaccagcgccgcggccaccagcatgatcatcatgttacgcaagccgcgagcctgcgccgcatccagctcgcggctatcaaaggcgataaaaatcacctgtggaacattgggctgagccagcgcgctgtcgcagcgcttcatcatccccatatggtgaccacgagtagggttgagcgggcggaactggcgataaatctccagcgccggttgcggctcggcaagccggcgccagcgctcctgttcgcccaccttgagttcacgcatttgcgcaggactgtacagtgcggtatccacctgttgcggatcgctgtgggcgataatcttaccgttttcatcggtcaccgcgaaccacagcacaccgggctgccaggccatctcctccagcaacgcctgcagctgcgcgtgatgcattcgcatccccatgccgacacgcgtgccggactccagggcgcggatcagcacacttcccttttcttcgatgttttgccgggcggcggcggtctcccgaccataatcgcggacaatcatcgcggaaaacagaagaaccaacaggacgaccgtgccggtcagcaaccagctcagggtgtcccgggaaaatgagataatgcgcggcatgggcgggtccttatcgtgtccttattcgctatcggaaggatccatcagcagaaatcatgccatttttccacaccgagaaacctgtcctcagacatatcgctggtgatttagcgagtaaaaatgactcgcggactccagccgcaacgggtcatttttactcgccagagtcacgtttgccgcgggccggccagtattgacgcgctttttcaggctggcatggaagatgcaacacagagggaaaccacacaggagatcacgctatgaaacggaaaccgactttatccctcatcttcgcggcgattgccgcactgacctttggcagtagcgcggcctgggctggacatcactggggctacaataacggaatgggcgcgcagggatacagccagctcacccaggaacagcaagcgaccgtgcagaagctacatgataattactatgcgcaaaccagcgccctgcgccagcagctgcagtccaaacgctacgagtacaatgcgctgctcaccgcgcagaagccggaaagcggaaaaattgaagccgtagcgaaggaaatggaaacgttaagccagcagttggatcagcagcgggtaaaatttgatatcgccctggctgaagcaggcgttcctcgcggcgcgggtatgggttacggcggctgccgcggtaatggcggtggtcatatgggcatgaaccactggtaaaactcagaacgatttttcgctcggctgccaggtacagaagttttcgttagccaccagcagcaactgagcgccttccggtgcttccagccacgccacgctcacttctacggaggagtgattctgtcggcgttcaatatgcgctaatgcccgctcatcaaggtcaggcttcacggtctggccttcacaggtggttacggtacgatcggtatgccagcgcccctggcgtaaaactacccgtccctgacgcaaggcgtcactggtttcacggatttgctgcgcccgatagcggtacagcgcaacctggtcgttggaaagctgctgcttctgcccgtcgacttcccgctgcataaagctcagctcgccctgggcatcaaagcgggcgcgaatatgttccggtggtttaccgtatacgttgagctcaataagcgttagttggccatcctgccagcggtactcgctggttgaggtgtcgccgcggtgccacggactaaaggcggcaagcaggtgcacttcatcgccggcatctttgcgccagatgcgcatcgcgccctggttatcggcgtagccgctggcggtgaaaggaggaagtgaggaatcgtggctgcaggcagtgagcaatagcgcgcctgccagcgtcagcgtgcgacgccagttagacaaaaggggcttaaaagccccttcgttaaaactggacactgccacgcggtcttacttgactgcgtctttcagcgctttgccagaaacaaatgctggcacgttagctgcagcgattttgatttctttaccggtctgcgggttgcggccagtacgctcagcacggtggttcactttgaaggtaccgaaaccaaccagttgaacagcatcaccttctttcagagactcggtaattgcagccagggtggattccagggcagcttttgcctgtgctttagacaggtcagctttgtccgcaattacatcaatcagttgagtcttgttcataagttatccttacaatgtgtttatcgcttgctaagcatcgagtgcgacggaaatgccagaaaagcactctcctgcatacacgcaccgatagccactttttttcgccccccaaatgtagaccagacaggggcggaatggaagtcttcagacgctacaattcaggcggtaaatcacgttttctggtctcattgctgaaaatttataccaatattgctctcaccggcctctcgcaggtctgcgcgcagccctttaatcagttcaatatcgcgttcttcgcagtcggccaacaggcggaaaatctcccactgaatgtcccattcttgttcaaccgccgggttgactctgagctcttcatcggtcatttcacgaccttcctgggtcatttccagcatcgcgacggtagtaatggaagtcttactgacctcgatagcatgttccagcgtttcaccgctcagccgtgagtggattaattcgctcagcgcgacgcaggcatcgatagccggatagacgccgtacatgtcgtagtcatccgcggacggaatcgcctcttccagcttttccagctgactatcgaaattcaccttcgcatcttttaccgtcagcgtttcccagatcaggtcaaggatacgacgatataactggccatcgccgaactcggtttgcttgcagaacatggcgtagttggggtacatacgctcgcacaggcaggccataaaggtgacgtgctgccagctctccagtttctccaggcgcaggtgaatcgggttttgtaacatgatgaattctcgaagtcagaaattaggcgcagtgtacctgaatcagccgtgatttgcttgccaacgcacaaaggaaggtcgacgggatgccacggcatcggcccagcgcgtcggctcgggtaggcgatagccctgcatacagcgttccacccacattaacgcgctatcgatacccacgcggtggcccgtactgatgaacagtgggttgcagcgtgctttgctgcgccagacccaggccagctgatcgcctttgtcgattaacggcgccaacgcgccgggctcggcgccgagcggttcaaacttaccgcataagcgttttttcgccacgccaatcgttggcacatcaaccatcaggccaaaatgactggcgacgccaagccgccggggatgcgaaataccgtggccgtcgacgaacaacagatcgggcttttgtgatagctgttgccacgccgccagcagcgcgggcgtctcgcgaaaggagagaaagccggggatgtacggcatcgtggtggcgacgcgcgccacctgatattccaccagctcaagctccggataagttagcagcaccatcgcagctcgggtaatttccccctcctgctcaaaccccacatcggcgccgccgatcagcaccggcgggtcgcgatccaatcggtccgcgcgttctaccgacgcggctaaagattgctgttgggttcgtagcgcagctaaatccatcatgcttatctcctattggtgatattgcgcggagagacgatgcaccgcctcaacaaagactcctgcatgctgtgggtcgacatcctgatggatgccgtggccaaggttaaagacatggccttcgccctggccgaagccggcgagaatgttagccacttcgtcttcaatgcgggcggcaggcgcataaagcattgacgggtccatattgccctgaagcgccactttgtggcctacgcgacggcgagcgtcggcaatatcggtagtccagtcgagacccagcgcatcgcagccggtctccgccatcgcttccagccattgtccgccgcctttggtgaacagcgtcaccggtacgcgacggccttcgttttcccgcagcaggccatcgacgattttatgcatgtagtagagcgagaactgctgatagtcgcggccggtcaacacgccgccccaggtatcgaaaatcatcaccgactgcgcgcccgctttgatctgcgcgttcagatacagggtgacgcttttcgccagcttgtccagcagcgcgtgcagcgcctgcggttcggcgtacatcatctttttgatgacggtaaaggctttgctgctgccgccttcaaccatgtaggtcgccagcgtccacgggctgccggaaaaaccaatcagcggcacttcgcctttcagttcacggcgaatggtacgcacggcgttcatcacgtagcctaattcttgttccgggtccggcaccggcaacttgtcgacgtcggctttggatttcaccggcgaagtgaagcgcgggccttcgccagcttcaaagtacagccccagtcccatcgcatccggaattgtcaggatgtccgaaaagaggatcgctgcatccagcgggtaacggcgcagcggctgtagcgtcacttcgcaggccagctcggcatttttacacagcgacatgaaatcgcccgcttgcgcgcgggtggctttgtattccggtagatagcggcccgcctggcgcatcatccacaccggggtgacatcaaccggctggcgcagcagcgcacgcaggtaacgatcgtttttcagttcggtcatttttacattcctttcgcgttgatgcgcccagtgtaacatgtcactcgtactctgcccgacacatcgcgaccgtatcttcgatcaggcgtcgcgccaccgtgcccggcggcggcaatagcggcaaatcgtcatagcgataccactctgcgctcagcagctcttttttatccacaacaatatcgccgctatcgtattcagccataaaggcggtcatcaatgattgcgggaagggccacggctgggaggtcacatagcgtaggtttttcaccttaatgccgctctcttccatgacttcgcgggcgaccgcctgctcaagggtttcacccacttcgacaaacccagccaacaccgtatggacaccattacgatggcgggtatgctgcgccagtaaaatcgaatcgtcgcgacgaatggcgacgataatgcagggagcgatttgcggataatagcgctcgcggcagtggccgcacagcatcgcccactcggttttactgacatgcatcgggtggccgcagtagccgcagaatttatgcgatcgataaaactcggccaactggatcccgcgcccagccagttggaaaagcccaggatcctgatccaatatctggcgcagcgatcccatatcacggcgacgatcctgacgcaccagccacaccgcttcgccttgccactcgccgagatgtagcgcgcgttcaccgacaagatcaaaatttaccgcttcgccatgtggtaattcccctgcgggaagccataatttttgttcgtgactgacgatccaccagccgcgatctaatttttcaataatacgatccatatctattgcgctaccttcgttttactggcacttttaacattatatttacatttgctgagcaacgttatttttaatcttgcggagtcaatcatgttaaaccagctggaaaacctgacggaacgtgttggaggcaataacaaactggtcgatcgctggctgcttgtgcgtaagcatttgctcgtggcttactacaacctggttggcctgaaacccggcaaagagtcctttatgcggcttaatgaaaaggcgctggatgacttttgccaaagcctggtggattacctctcatccggtcattttaatatttatgaacgtattatcggagaaatggaagggagtacccctcttttagccgctaccaaaatctacccgcagctggaagccaatacccagcagatgatggactattacgatacctgcctcgaaaacgccatcgatcatgataactatctcgaatttcagcaggcgctgtcagatatcggcgaatcgctggaggcgcgcttcgcgcttgaggacaagctgctggcgctggtcgtcgctcacgatcagaaagacaacgttggcgacaatatcgcgccgaccgcttgagttgtgaaccgttaacgagtaatttacatacattatccctctgcggagggatttcatcttgtcggagtgcctattttccacacgaaagctgaagtggaaaaggctgagaccgtttattcgggatccgcggaacctgatcaggctaatacctgcgaagggaacaagagtaaactgctggtcgcacctgcctgttacgggctggtcgcatctgttactccatccgtcgtctgacaagccatctccttttttgtaactggaatgtgctatgtctactaccaaactgacccgccgggaacaacgcgaacacgcgcagcgattcattgatacgctggaaggtaccgcttttcctaattctcgccgcatctacattcaaggctcacaggctgatatccgtgtcccgatgcgtgaaattcagctcagcccgacgctcatcggcggtgataacgataacccccagtacgaagccaacgaaccgataccggtgtacgacacctccgggccttacggcgacccggagatcaacatcgatgtccgccaggggctggcaaaactacgccaaccgtggatcgacgcgcgtaacgactgcgcaccgctcagcgaacgcagctcggcttacactaaagcgcggctggccgacgatggccttgatgaactgcgcttcggcggcctgctgacgcctaaacgcgccgtcgctggcaaatgcgtgacgcaactacactatgcccgccaggggatcgtcaccccggagatggaattcatcgccattcgcgaaaacatgggccgcgagcgtatccgcagcgaggtactgcgccagcagcatgccggagaaggctttggcgcccgcctgccggacaacattaccgccgagttcgtccgcgatgaagtcgctgccgggcgagccatcattccggccaatatcaatcacccggaatccgagccgatgattatcggccgcaacttcctggtgaaagtgaatgccaatatcggcaactcggcggtgacctcttccatcgaagaagaggtcgagaagctggtctggtcaacccgctggggcgccgatacggtaatggacctctctactggccgctatatccacgagacccgcgaatggatcctgcgcaacagcccggtgccgattggtaccgtcccgatttaccaggcgctggagaaggtcaacggcattgccgagaacctgacctgggaagccttccgcgataccctgctggaacaggccgaacagggcgtcgactacttcacgattcacgctggggtgctgctgcgctacgtgccgatgaccgcgaagcggctgaccgggatcgtctcgcgcggcggttccatcatggccaagtggtgcctgtcgcatcatcaggaaaacttcctctaccagcacttccgcgaaatctgtgaaatctgcgccgcctatgacgtgtcgctgtccctcggcgatggtctgcgccccggctcgattcaggatgccaatgacgaggcgcagttcgccgagctgcatacgctgggcgagctgactaaaatcgcctgggagtatgacgttcaggtgatgattgaaggccccggccacgtgccgatgcagatgattcgccgcaatatgaccgaagagctggaccactgccacgaagcgccgttctatacgctggggccgctcaccaccgacatcgcgccgggctatgatcatttcacttccggtatcggcgcggcaatgattggctggtttggctgcgccatgctgtgctacgtcacgccaaaagaacatctcggcttgcccaacaaagaggatgtaaaacaggggctgattacctacaaaatcgccgcccacgccgccgacctcgctaaaggccacccgggggcgcagatccgcgacaacgcgatgtcaaaagcgcgtttcgaattccgctgggaagaccagttcaacctcgcgctcgatccctttaccgcgcgggcctatcacgatgaaaccttaccgcaggaatccggcaaggtcgcccacttctgctccatgtgcgggccgaaattctgttcgatgaagatcacgcaggaagtccgcgactacgccgcgaagcaaaatatcgaagccggcatggccgatatgtcgaataacttccgcgcccgcggcggtgaaatctacctgaaaaaggaaaatgcctgatgtaccagcctgactttccgcccgtaccgtttcgtctcgggctttatccggttgtcgatagcgtagcgtggattgagcgcctgctggaagccggcgtacgcactattcaattgcggatcaaggaccagcgcgacagcgacgtagaggatgatgttatcgccgccatcgcgcttggccgccgctatcgcgcgcgtctgtttatcaatgattactggcaactggcgattaagcaccgggcgtatggcgtacatctgggtcaagaggacctggaaaccaccgacctgagcgccatccgtaaagccggactgcgccttggcgtctccactcacgacgacatggaaattgacgtcgcgctggcggcgcgcccttcctacatcgcactgggccatgtcttcccgacacaaaccaaacagatgccttcggcgccgcagggcctcgaacagcttgccgggcatattcagcggctggccgattatccgacggtagcgataggcggcatcagtctggaaaaagcaccgggcgtactggcgaccggcgttggcagcatcgcggtcgtcagcgccattacccaggcagcagactggcgggatgccactgcacaactgttagcgctggcgggagcaggcgatgaatgatcacgacttcatgcgctatagccgccagttgctgctggaagatatcgctattgagggacagcagaaactgttagccagccgggcgctgattattggcctgggcgggttaggttcgccggcggcgctatatctggcgggggccggcgtcgggacgctgacgctggccgatgacgacgcggtgcatctcagcaacctgcagcggcaaattctgttcaccagtgacgatatcgaccagccgaaagccgcggcggcaaagacgcgtctcaaccaactcaatccgcaaattcgcctcgtcgcgctacagcagcgtttaagcggcgaggcgctgcgcgctgaagtggcgaaagccgacgtggtgctggactgtaccgataacatgatcgcccgccaggcgattaacgcggcctgcgtagcccttgagacgccgctggtgaccgccagcgccgtcggcttcggcggccagttgatggtgctgacgccgccctgggcgcagggctgctatcgctgcctgtggccggacaccgccgagccgcaacgtaactgccgcaccgcggggatcgtcggtccggtcgtcggcatgatggggacgctgcaggcgctggaggccataaagctccttagcggcatggcgacgccgcgcaacacgctacggctgtttgacgcccgcaccagcaactggcgcaaccttacgttgcaaaaggcccagggctgcccggtatgcggaggccatgatgcaagtctggtttaacgacgaaccgctggagtgcgcggacaacctcagcgtaagcgccctgctcagccaactggaacagctccagccgggcgttgcgctggcgctcaatcaacacatcctgccacgcgaacggtgggaagatcatctcttgcaggaaggcgatcgggtcctgctttttcaggttatcgccggaggctgacatgttacgtattgctgataagacttttgaatcccacctttttaccggaaccggcaaatttgccgccccggaggtgatggtcgaggcgattcgcgcctcgggaagccagctggtgacgctggcgatgaagcgcgtcgatttacgccagcataatgacgcgattctcgcgccgctgctggcggcgggcgttaacctgctgccgaatacctctggcgccaagacggcggaagaagcggtatttgccgcccgtctggcgcgggaagccttaggcacccactggttgaaactggagatccacccggacgcccgctggctgctgcctgaccccattgaaaccctgaaggcggcggaactgctggtgcgcgaagggtttgtcgtcctgccctattgcggcgccgacccggtcctgtgcaaacggctggaagaggctggctgcgcggcggtgatgccgttgggcgcgccgataggctccaaccaggggttggaaaccagggctatgctggagattattatcgaacaggcgacggtaccggtggtcgtcgatgccgggatcggcgtgcctagccacgcggcgcaggcgctggagatgggcgctgatgcggtgctggtcaataccgccattgccgtcgccgacgatcctgtcgccatggcccgcgccttccgcatggcggtcgatgccggattactggcgcgtcaggctgggccgggggcgcgcagttcccaggcgcaggccaccagcccgctgactggctttctggaggcgctggcatgaaaaccttcagcgatcgctggcgacagctggagtgggatgacatccgcctgcgcatcaacagcaaaaccgccgccgacgtcgaacgggcgctggaggcaaaacagctgacccgcgatgacatgatggctctgctctctcctgccgcggccgattatcttgaaccactggcccaacgcgcgcagcgcctcacccgccagcgcttcggcaacaccgtcagcttttacgttccgttgtatttgtccaacctgtgcgccaacgactgtacctactgcggcttctcaatgagtaatcgcattaagcgcaagacgctggatgaagcagagattgcccgcgaatgcgccgcaatccgcgatttaggctttgagcatttattactggtcaccggcgaacatcaaagtaaggtcggaatggattatttccgccagcacctgccatccatccgccgccagtttgcctcgctgcatatggaagtgcagccgctggcgaccgaagagtatgccgaactaaaaacgctggggcttgatggggtgatggtctatcaggagacctaccatgaaggcatgtatgcccagcatcacttgaaaggtaaaaagcaggatttcttctggcgccttgatacgccggatcgcctgggcgaagcggggatcgacaagatcggcctcggcgcgctcattggcctttccgacagctggcgggtggactgctttatggtcgctgaacatctgctgtggctacagcagcgctactggcgtagccgttactctatctccttcccgcgtttacgcccttgtgctggagggattgcgccagcctcgctgatggacgagcgtcagctggtacagaccatttgcgccttccgcctgctggccccggaggttgagctgtcgctatcgacacgcgaatcaccgtggttccgcgaccgggtgatccctctggcgataaacaacgtcagcgcgttctccaaaacccagcccggcggctacgccgacgatcatccggaacttgagcaatttgcgccacacgacgatcgccgccctgaagaggtcgccagcgcgctggccgcccgtggcctgcagccggtatggaaagactgggatagttggctgggacgcgcctcgcaaacatcatgaagcatgctgcaagcagctgattattttgcgtgcctgcacgagagatgaaaaacggaggctcgccgaactgccgccgtttttctattctgccctggtcagcagcggacgctgaccagggcgagcttttctttcctctcttcgccctgcctccaccgtccgcactgccgcaaacatattgctatcaaatattaatcacgatgatgagcgcactcagcgttataatttagcgatagttacctgattcgctaggcaggcatgctggcttaacctgcgtctaaacccacggtttataaatcccggacgattaacaacttatggcacgccacaacagaaagctctcttttactacgccaatcgtagtggggtttgcggggattttgctcagttttttactgatcgcaatctttgttaccgcgacgcaaaagaaaaactttcttgaagattatcaccatattaaccgcaacttcacccataaccttgcggtgaactacaccgaatcgctgctgcgcgaaaatgactacattctggcgcgcgcgacgaaatactttgcccgtgacgatgcgctcaatagcgccgtaaatctcgatccgcaaaagggtctggacgacttgatgcgtctgcaggagctgatgccgacggtctcctccatttcgcttgccgatactctcggtcattatctgcgcgctcccgaagtgatggaaggcgatgagagccgcacgtttgatccgaaaacgcgcccctggtttattcgccaggcggaagccagtaccttcagcctctataccagtccctatctggattacttcacccaccatcctaccgttaccgtctaccggcctgtcatttcaccgcaggggaggctcaaaggtagcctggcgtttcatatggatctgacgtcgatgggctacgcgttacggcagattgtctcaccggtacagggcgagttttttgtcgtgcaacgcgacggcaaagtggtgatccatcccgataccggcgcgctatttaaaacctacgttagcgcggaactcatggacaaaatgaccagcgcggaaggccaactttatgatgaggaacataaggcctggtactactactattcctttaccaaccctgactggttcgttattttccgcgtcaccgataccacccttgccgacctgacgcgctatgaaaccgatattgtcgcctggggattcgctcttgccgccattgtcatcgtcctgttcgggctgtatctgcgccacgcttcgcgtaccgtactgatgaacatcattaacgccattaagaccggtgacgtcaaacgcgcgccgcggctggaagccatgctcagcaaagcgatcgagagcaataaacagcgtgagctcacctatgtccgccaggccaccatcgatgcgctaaccggctgcaaaaaccgccgcgccttcgacagcgatatcgccgcgctgatgaacgatcaccagcctttcgccctcgcgttggtcgatatcgacaactttaaatcaattaatgatacctggggccacctcaatggcgacatcgtgctgcgcaacgtcgcacgtgaagggatacagatcctgcagccgcaggagatctcgctttaccgctacggcggcgaagagtttgccgttatcttccctgccgaacatgtcgataacgcgctcaccattctggagagctggcgccttaacgttgccagccgaacctggcgcgaagaaggattaaccgtcacttttagcgccggtctaggggaatggaatatggagccgctggaaaaactggtcgttagcgtggatgaagcgttgtataaggccaaacagcagggcaagaaccgaatcgttcgcgcctgagcataactccctgacagcccgcttttgcgggcttttttatctaggccgctgcaaaattgaaaccggtttcattttttgtgatgttttacacacaatcatggtgaagcggttgtgccgcgccgccgcccgcgataaagatgatgcatcaaggaacatacataagggcgatgaaactatgaagaatatcgttttatgctgtgccgcaggaatgtccaccagcatgctggtgcaacgcatgaaagacgccgcgcaaaagaaaggcatcgaagtctcgatcaaagctgtgccggtagcggagttcaaagataacctggccgcggcggatattatcctgctcggcccgcaggtgaaatacgagcaggcgaaactacaggcgctagccgacccggtcggtaaaaaggtcgccgttatcgatatgatggattacggcatgatgaaaggcgatgccgttctggataaagccctgaagctgatggagtaaggcatggaagatttagagacgattatcatggagctgctggtcaacgccggctccgcgcgcagttctgccctcaccgccctgcagcaggcgcgtaaaggcgatttcgccgccgccgaacaggctatggccgactcccacgaattcgtgaagcatgcgcataaaatccagacccagcttatcggtctggatgaaggcagcggcaagctgccggtgaacctgattaccgtgcactcccaggatcatctgatgaacgcgatggtgattcaggatttagcgaccgatatgatcgaactgtatcgccgcctgccgcccgcacaataatcccgctgatttatcaggcgccgccagcggcgcctgtctcacttacagaaaaccgtacatcgccgcgaacacccagccaaagacgcaggaaacgctcacgccaattaatcccggcagaataaagctatggttaatgacgaagcggccaatatgcgtcgtgcctgaacggtcaaactgaatcgccgccagatcgcttgggtaagtcggcaggatgtaatagccatagcaggcgggtgcggaagccacgatataggccgggtcaacgccgatcgccagcgccaccgggacaatcgccgccagcgccgccgcctgagagttgacgaacttagataccaataacagcacgatagcgtaggcccacgggtactccttcaccatctctccgagcacgcctttaatctcggtcatgtgcgcgccgaacatggtttccgccatccatgcaataccgtacaccgcgacgatagcgatcatccccgagcggaaaacctcatttttagaaatcgacgctgggttagttttggtaatgatgatgataagcgccccggagagcagcatgaacatctggatcaccagtaccattgagagaggcttaccatcgaacgccgggcgcagttcggaaaacgcgccaagcaaagccactacggcgattgaggcaaggaagatccacatcgcgatccagttgctggtcggcagctttttatccaatagcgtggccgtatcgccataaacataatgacggttttccggtatcgcaataaacgcctggaaggtctcgtctttatcaaggtccttaccgcggaaccaactgaagatgccaatcgccaggatcccaagcagcgttgacggaatggttatcgccagtagatcgagaaactcaaggtgcttaccattaaaggtaaaattcccgagcatcgccaccagcgagaccaccgccaccgaaaccggactggcaatgattcccatctgagcgccaatcgagctcgccgccatcggccgctccgggcgaatattatttttgatagctacgtcgtaaataattggcaggatcgtatacaccacgtggccggtaccgcacaggatcgtcagcgtacaggtgacgaatggcgcgacgatagaaacgtatttggggttgcgccgcaggagcttctcggcaatctgcagcatcacgtctaaacctccggatgcctgtagcgtcgccgaggcggccaccaccgcgataatcaccagcatgacatcaaccggcggttttcctggtttaagatgaaaaacaaaaactaaaataactaagccaatgccgcctaaaaggccgagcgcaatgccaccctttttcgcgccgtagaacagacaaattaagataatgatgagctgtatagcaaattccatgcatcccccagaagctatccattaaataacgacaatactctccgccttatttttttttgctcacctcctccattgccttttaacaggcgcagtgaacccctcagttgcggtaaaccgaaaaggatggggaaaagtaatcacatgattctttgagtgttttgactatatagcgtttgcggcgcctattttttgatacatgtagaatttttatccatcgattagtgatggcataaagaaatagcaaatagataattatcagacatgtttaagttgctaattaattgcagcaattacattaaataaatgtaatttagtttaggtgagataaatcgacaggtaataaaaaagccagtcaggaaacctgactggcttttaagcgcttagcgaatcaacgattaatcgttgtcagaaccgcccaggcctgcgttcagcagctctgccaggttggcagaggcttcttctacgctcacctgcggcgcagctggctgttcgcccgctgcgcgacggcgcatacgatcctggtggtacgcataaccggtacccgccgggatcagacgacccacgatgacgttctctttcagaccgcgcagttcgtcgcgtttgcccgcaacggctgcttcggtcagcacgcgagtggtctcctggaacgatgccgcggagatgaaggactcggttgccagagacgctttggtgatacccagcaggtcacgggaataggttgccgcaactttgccattcgcttcaagctcgcggttagcgatcttaacgcgggagtattcaacctgctcgccttcgaggaagtcggagctaccagcactttcgatggtcgctttacgcagcatctgacgaacgataacttcaatgtgcttatcgttaatcttaacgccttgcagacgataaacgtcctgcacttcgttggtgatgtaacgcgttaccgcgtgtacgccacgaagacgcagaatgtcgtgcggcgcttccggaccgtcggaaaccacgtcaccacgttctacacgttcaccttcgaacacgttcagctgacgccatttcggaatcatctcttcgtacggttcgctaccgtctaccggggtgataaccagacgacgtttccctttggtttctttaccgaaggaaatgatgccgctgatttcagccaggattgccggctctttcggacgacgtgcttcgaacaggtccgcaacgcgcggcagaccaccggtgatatccttggtaccgccagattcctgcggaacacgcgccagggtgtcaccagagctgatctgtacgccatcttccagctgaacaatcgctttacccggcaggaagtactgagcaggcatatcagtgcctgggatcagaacgtcgttgccctgagcatcaacaattttcagcgccggacgcagatctttaccaccggaggtacgttctgcggaatccagaaccaccagcgaagacagaccggtcagctcgtcggtctgacgagtaatggtctggccatcgatcatgtcagtgaagcggacgaaaccactcacttcggtgataaccggcatggtatgcggatcccagtttgcaacggtttcaccgccagcaacctgttcgccgtcgcctttagccataacggagccgtaaggcactttatagctttctttggtacgaccgaattcgtcgatcagcttcagttcggtgttacgcgaggtgataaccagtttaccgctggagttcacaaccgacttcgcattgctcagacggatgctacctttgtttttcacctggatgctggattcagcagccgcacgagatgccgcaccaccgatgtggaacgtacgcatcgtcagctgtgtacccggctcaccgatggactgtgccgcgataacgccgatagcttcacctttgttgatgaggtggccacgcgccaggtcacgaccgtagcagtgcgcacatacaccaaagtcggtgtcacaggatacaacggaacgaactttgacggagtcaacggagttctcttccagcaggtcacaccagtgctcgtgcagcagcgtgttgcgtggaaccagaatgtccgcggtacccggcttcagaacgtcttcagcagtcacacgacccaatacgcgatcgcgcagcggctctttaacgtcgccgccttcgataaccggcgtcatggtgatgccttccagggtgccacagtcatcttcagtgacaaccaggtcctgcgcaacgtcaaccagacgacgagtcagataaccggagttcgctgttttcagtgcggtatccgccagacctttacgagcaccgtgggtggagatgaagtactggagtacgttcagaccttcacggaagttcgcggtgatcggcgtttcgatgatggagccatccggcttcgccatcagaccacgcataccagccagctgacgaatctgtgccgcagaaccacgcgcaccggagtcggccatcatgtagatgctgttgaaggaaacctgctgctcttcctgaccgtcacggttaatcacggtttcggtttgcaggttatccatcatcgctttggatacacgatcgttcgccgcagcccagatatcgataactttgttgtagcgttcgcccgcggttaccagaccagactggaactgttcctgaatctcagcaacttccgcttccgcttcgctgatgatttcgtattttttctccgggatgaccatgtcatcgataccaacggatgcacctgaacgcgctgcataagcaaagccggtgtacatcgtctggtccgcaaaaataacggtcggtttcagacccagaatacggtaacaggtgttcagcatcttagagatcgctttcttaccgagcgcctggttcacgatagagaacggcagacctttcggtacgatcatccacagaatggcacggccaatggtcgtgtctttcaggctggtcttcgcgacgaattcaccattgtcgtctttttcgtattcggtgatacgcactttaacgcgcgcatgcagagaggccagaccggcgcgataaatacgctccgcttctttcgggccagtcagcaccatgccttcgcctttggcgttaacacagtcacgggtcatgtagtacagacccagtacaacgtcctgagacggaacgatgattggttcgccgttcgccggggacaggatgttgttggtagacatcatcagcgcacgcgcttccagctgggcttccagcgtcagcggtacgtgcacagccatctggtcaccatcgaagtcggcgttatatgccgcacaaaccagcgggtgcagctgaatagctttaccttcgatcagaaccggttcgaacgcctggatacccaaacggtgcagagttggcgcacggttaagcagtaccgggtgttcacggataacttcgtccaggatatcccaaacgacagcttcttcgcgctcaaccattttcttagcggctttgatggtggtggccaggccacgcagttccagcttgccgtagatgaacggtttgaacagctccagcgccattttcttcggcagaccgcactgatgcagacgcaggtatggacctacggtgattacagaacgaccggagtagtcaacacgcttaccgagcaggttctgacggaaacgaccctgtttacctttgatcatatcggccaaagatttcagaggacgtttgttagaaccggtgatcgcacgaccgcgacgaccgttatccagcagggcgtcgaccgcttcctgcagcatacgtttttcgttgcgtacgatgatgtccggcgcagccagatccagcagacgtttcagacggttgttacggttaatgacgcgacgatacagatcgttcaggtcagaagtcgcaaaacgaccgccatccagcggaaccagcggacgcagatctggcggcagaaccggcagaacggtcaggatcatccactccggcttgttgccagactgaacgaaggcttccagcagcttaatgcgcttggtcagctttttacgcttggtttcggagttggtttcgttcagctcttcacgcagctgctcgcactcttgctccaggtccatgcttttcagcagggcctgaatagcttcggcgcccatcttcgcatcgaattcgtcaccgaactcttccagcgcgtccaggtactgctcttcagtcagaatctggttgcgttcgaggttggtcatgccaccttcgataacaacataagattcaaagtacagtacgcgttcgatatcacgcagcggcatatccagcagcaggccgatacgggacggcagagacttcaggaaccagatgtgggcagtcggagacgccagctcgatgtggcccatgcgctcacgacgcactttggtctgggtcacttcaacgccgcacttctcacagataacaccacggtgtttcaggcgcttgtacttaccgcacaggcactcatagtcttttactggcccgaaaatacgagcgcagaacagaccgtcacgttctggcttgaacgtacggtagttaatggtttccggctttttaacttcaccgaaagaccatgaacggatcatgtctggcgatgccagagcaattttgatcgcatcaaactcttcggttttagtttgcgctttcagaaactttaataagtctttcacggatttgctcccgtcggagttagcacaatctggcgccgggttttatcccggcaccagtgacctgtttgagcgagagttactcgtcttccagttcgatgttgatgcccagcgagcggatttctttcaacagtacgttgaaggattccggcatgcccggttccatctggtggttgccgtccacgatgtttttatacatcttggtacgaccgttcacgtcatcagacttaacggtgagcatttcctgcagggtgtaggccgcgccgtatgcttccagcgcccacacttccatctcaccgaagcgctgaccaccgaactgcgccttaccacccagcggctgctgagtaaccaggctgtaagaaccggtggaacgagcgtgcattttgtcgtcgaccaggtggttcagtttcagcatgtacatgtaacccacggttaccggacgttcgaactgttcaccggtacggccgtcaaacagagtgatctgaccggaagtcggcaggtcgcccagctgcagcagctctttaatttcagcttctttcgcaccgtcgaataccggcgttgcgatcggcatgcctttacgcaggttttcagccagacgcagaacttcttcatcgctgaaggtattcaggtcaactttctggcgaacgtcagcgcccagatcgtaagcacgctggatgaattcgcgcagtttcgcgacttcttgctgctgtttcagcatggcgttgatcttatcgccgatgcctttcgcagccatacccaggtgagtttccaggatctgaccgatgttcatacgagacggtacgcccagcgggttcagtacgatatctaccggcgtaccgttagcatcgtgcggcatatcttcgatcgggttgatcttagagataacacccttgttaccgtgacgacctgccatcttatcaccaggctggatacggcgtttaacggccaggtataccttaacaatcttcagcacgcccggtgccagatcgtcgccttgggtgattttacggcgtttcgcttcgagttttttctcgaactcgtgtttcagttcgtcatactgctcagccagttgctccagctgattttgtttctcttcgtcggtcaggcccagttccagccagcgatcgcgaggcagtttgtcgagcttgtcagcttcaacgccaccggcaaccagcacagcgtagatacggctgaacagaccagcttcgaggatctgcagttcttcagacaggtcttttttagcctgcttcagctgcatctcttcgatttcaagcgcacgcttgtctttttctacgccgtcacgggtaaacacctgaacgtcgataacggtaccagagacaccgttcggtacgcgcagagaagagtctttaacgtcagacgctttctcaccgaagatcgcgcgcagcagtttctcttccggagtcagctgggtttcacctttcggcgttaccttaccaaccagaatgtcgccgccggtcacttccgcaccgatataaacgataccggattcatccagtttggagagcgcagcttcacccacgttcgggatgtcagcggtgatctcttccggccccagcttggtgtcacgggacacgcatgccagttcctgaatgtggatggtggtgaaacggtcttcctggacaacacgctcggatacgaggatggagtcttcgaagttgtagccgttccacggcatgaacgctacgcgcatgttctgacccagcgccagttcaccgagatcggtggacgggccgtcggccaggacgtcgccgcgttcaattggttcgcccagggacacgcaaggcatctggttgatgcaggtgttctggttagaacgggtgtacttggtcaggttatagatgtcgatacctgcttcgcccgggtacatctcgtcttcgttaactttgataacgatacgggaagcatccacgtactgcacggtaccgccacgtttagccaccgcagtaacaccggagtcaacggcaacagcacgttccataccggtaccaaccagcggcttatcagcgcgcagagtcggaaccgcctgacgttgcatgttcgcacccatcaatgcacggttggcgtcatcgtgttccaggaacgggatcagggacgcaccgacggataccacctgctgggtggatacgtccatgtagtcaacctggtcgcggctgaacaagctggattcgcctttactacggcaggtaaccagatcttcaacaaagtggccttcgtcatccaggttggagttcgcctgagcgatgacgtagttaccttcttcgatagcagacaggtaatgaatttcgtcggtaacaacaccgtcggtcactttacggtacggggtctcaaggaaaccgtattcgttagtctgtgcgtacacggacagggagttgatcagaccgatgttcggaccttcaggcgtttcgattggacatacgcgaccgtagtgagtcgggtgtacgtctcgaacttcgaagcctgcgcgttcacgggtcagaccgcctgggccgagtgcggagatacgacgtttgtgcgtaatctcagacagcgggttgttctggtccataaactgggacagctggctggaaccaaagaactctttcactgctgcggaaatcggcttggcgttgatcatatcctgaggcatcagggtatccagatcgcccagagacagacgctctttaaccgcacgctctacacgcaccaggccaacgcggaactggttttccgccatttcgccaacggaacggatacgacggttgccgaggtggtcgatatcatcgacttcgcctttaccgttacggatatcaatgagcttcttcatcacttcgatgatgtcgtctttgctcaggataccggaaccttcgatttcgtcgcgcagcagagaacggttgaacttcatacgaccaaccgcggacagatcgtagcggtcttcggagaagaacaggttctcaaacaggctttcagccgcttcacgagtcggcggctcacccgggcgcatcatgcggtagatttctaccagcgcgctcagacgatcgttggtcgggtcgacgcgtacagtttcagaaatgtacggaccgtggtccagatcgttggtgaacagcgtttcgatacgcttgtggccggactggctcagtttagccagcagatccaggctcagctccatgttcgccgggcagatcagttcgccggtcgcttcgtcgatgtagtctttagaagcaactttacccgcgatgtactcaaccggaacttcgatatgtttgatatcgtctttttccagctggcgaatatggcgcgcggtaatacgacggcctttctcaacgtacactttaccgttggcttcgatatcgaaggaggcggtttcaccgcgcagacgctccggtatcagctccatctgcagcttgttgtcgcgaatttcaaagaccactttctcgaagaacaggtcaaggatctgctcagtggtgtaattcagcgcgcgcagaatgatggttgcaggcagtttacgacgacggtcgatacgaacgaacaggttgtctttcgggtcgaattcgaagtccagccaggaaccacggtaaggaatgatacgcgcgttatacaggaccttaccggaagagtgagtcttacctttgtcactgtcaaagaagacgcccgggctacggtgcagctgagaaacgataacacgctcggtaccgttgataacgaaggtaccgttgtcggtcatgagcgggatttcgcccatgtagacttcttgttctttgatgtctttaacggtgccttccggcgcttcgcgctcgtagatcaccagacgcagcttcacacgcagcggtgcggaatacgtcacgccacggatctgacattctttaacatcaaaaacaggttcgcccagacggtagctgacgtattgcagctctgaattaccgctgtagctctgaatcgggaatacggaacggaaggctgcttccagaccatactgcccttcaggatcttgctcgataaacttctggaacgagtcaagctggatagaaaggagataaggcacatccagaacttgtggacgtttaccaaaatccttacgaatacgttttttctcggtataggagtaaaccatagggttcctcagctcgctgacaagtcgacccatctgcccggaaagggcagttttttatgcaacactattttgttgaccggaaaatggaacactttccgcaatgcctgttgctatcacgcttaaaccatttcattgcgatttacacagcccaggaaccctaacctgtcgcagtatattaagtcgtcgatagaaacaagcattgtgaggcaaaccagcagtcaaacagtgtgaaatgctactggcgccttacagcgcaaaaaggctggtgactaaaaagtcaccagcctcagcctaatttctcaggctgcaaccggaagggttggcttatttaacttcaacttcagcgccagcttcttccagagattttttcagagcttcagcgtcgtctttgctgatgccttctttcagtgcagccggtgcagattctaccaggtctttagcttctttcagacccagaccagtcgcgccacgtactgctttgataacagcaactttgttagcgccagcagctttcagaattacgtcgaattcagttttttcttcagcagcttcagccgggccagcagctacagctacagcagcagcagcggaaacaccgaatttttcttccattgcagagatcagctcaacaacgtccattacggacatagcggatactgcttcaatgatttgatctttagtgatagacatttaaattgttcctgaatatcagaataagtttatacgtaagcgagtgctttacaaagataactgcgattaagcagcttctttcgcatcgcgtacagcagccagagtacgaaccagtttgccagccgaagcttctttcatggttgccatcaggcgtgcaattgcttcttcgtaggtcggcagagttgccaggcggtcgatttgcgacgccgggatcagctcaccttcaaaggcagcggctttgacctcaaattttgcattcgctttcgcgaactctttgaacagacgagcagcagcgcccgggtgttccatagagtatgcaatcagggtcggaccaacaaacgtgtctttcaggcactcgaacggagtaccttcaacgacgcggcgcagcagggtgttacgaacaacacgcatgtaaacgccagcttcacgacctgctttacgcagttcagtcattttatctacagttacgccacgggaatccgcaactactgcagacagcgcgcctttggctacttcgctgacttcagcaacaatcgcttgtttgtcttgaagatttaaagccattagctttgctcctggatgtttgccagagcttatgctctggaactcacttcactctattcaacgaatagagcgtcttaatacggtgagcagaaacaagccagagtatccaaaaaataatcttagcgttctgtcaccgtctacgcaggggattaagtttcttacgaaacacctgcggtcttcgacggaggcctggataggccaggctccaacgaacaaatctgttagccgctaactttcgttagcaaacgtgggggtaagattgtagacaaaatcaccgcccacgtaaaggcattagtttgcagaagcgttcaggccagcctgatctactgcaacacctgcacccatggtggtggagatgctaactttcttgatgtacacgcctttagcctgagtcggttttgcttttttcagcgcaaccagcagagcttccaggttttctttcagtttgtcagcgtcaaagtccactttaccgatggtggtgtggatgatgccgtttttgtcgttacgataacgaacctgacctgctttagcattcttaaccgcttcagcaacgttaggagttacagtaccaactttcgggtttggcatcaggccgcgcgggcccagaacctggcccagctggccaacaacgcgcattgcatccggggaagcaataacaacgtcaaagttcatttcgcctttcttgatctggtcagccagatcttccatacctaccagctcggcgcctgcagctttagcagcttcagcgttcgggccctgtgcaaatacggcaacgcgaacagaacggccagtaccgtgcggcagtacagttgcaccacgtacgttctggtcagatttacgagcatcgatgcccaggtttacagcaacgtcaacgctttcaacgaacttagcggtcgccagttctttcagcagagagatggcttcgttgatgtcatactgtttagttgcatcaactttctcacgaatcacggacatgcgcttggtcagtttagccatttcttagtcctccactaccaggcccatggaacgtgcagtaccttcgatggagcgagtcatcgcttcaatgtcggcaccggtcatgtcggcagctttggtctgcgcgatttcctgcagctgagcgcgggaaattttaccaactttctctttgttcggcttaccagagccggacttgataccagccgcttttttcagcagaactgctgccggcggagttttggtaacgaaagtgaaagaacggtcagcgtaaacggtgataacaaccgggattggcagacctttttccatggattcggtttttgcgttgaacgctttgcagaattccatgatgttaacgccctgctgacccagtgctggaccaaccggcgggctcgggtttgccataccagctgcaacctgcagcttgacgtaggcttgtactttcttagccattcttaaatcctcagattgggtattaacgcttcagagaagctccccgtgattaaacatcgttttacgggccaggcccataaaaacaaaaggcgcgaaattgtatgccaatttcgcgccctatgcaacgattaaatcgctgcttttttgatcgccggcttacgccttctcaacctgaccgaagtccagctctaccggagtcgcacgaccgaagatagaaacggaaactttcaggcgagacttctcgtagtccacttcttcaacaacgccgttaaagtcagcaaacggaccatcgttgacgcgaaccatttcgcccggctcaaacagcgttttcggacgcggcttatcgccaacctgctgcagacggttcatgatggcatcaacttctttgtcgctgataggcgccggacggtcggaagtaccgccgatgaagcccatcacacgcgggacgctgcgcaccaggtgccagctcgcgtcgttcatgaccatctgaaccagaacgtagccagggaagaatttgcgttcgcttttgcgacgctggccgccacggatttcaaccacttcttcggtcggaaccatgacttcgccaaacaactcttccatgttgtgtaatttgatatgttcacgcagcgaagtagctacgcgaccttcaaaaccggaaaacgcctgaacgacgtaccagcgcttcttaggagcttcagacatctcagaacctcaggccagtgataaaggataccaggcgaaccagaataccatccagtccccacaggatcagtgacattactgcagttacggcagcaacaatcagcgtggtgtgcagcgtttcctggcgggtcggccagatcactttgcggacttcggttctcgcttcgcgggcgaaggcgactgtcgccttaccttttgtcgttaacagagcgacgccaccggcagcagcgataagaatcaccacagccagcgcacggatcgccagcataatgtcgcggtaaaggaagttgcctacgatggctacgatcagcagcacggcaacgataacccacttcaacgcttccaggccgcgcccgctcccttgagcttcggtattcgcactcataaaccaacctgtcacaagaattcagacaaacatcttcgccccgcattaaatgcgaggcgaccaaaccgaaatgctctgctgcgtttcggactttacgccctcttcagagcctgtctcagcaatgattatgacaaaaaaaatcactgatgagccaggttctggtgtgaaagcgtgcaaaaagggcatcaaatgatgcccttttattgcgcattgcgtcaaatgttatcagcgattagccgagaactttagcaaccacgcccgcgccaacggtacggccgccttcacggattgcgaaacgcagaccatcgtccatcgcgatcgggtggatcagggtaacaaccattttgatgttgtcgcccggcattaccatctctacgccttccggcagttcgatggtaccagtcacgtcagtagtacggaagtagaactgcggacggtagcctttgaagaacggagtatgacggccgccttcgtctttggacaggatgtacacttcagattcgaacttggtgtgcggcttgatgctgcccggcttagccagtacctgaccacgttcgatttcttcacgtttgataccacgcagcagaacacctacgttctcgcccgcacggccttcgtccagcagtttgcggaacatttcaacgccagtacaggtggttttcgcggtgtctttgataccaacgatttcaacttcttcaccaactttgatgataccgcgctctacacgaccggtaacaacggtaccacgaccggagatggagaatacgtcttcgatcggcagcaggaacggcttgtcaatcgcacgctctggttccgggatgtaagaatccaggaagccagccagttcgatgattttcgcttcccactctgcgtcgccttccagcgctttcagagcagaaccacgaacgatcggagtgtcgtcgcccgggaaatcgtactgagacagcagttcacgaacttccatctcaaccagttccagcagctcttcgtcatcaaccatgtcgcatttgttcaggaacacgatgatgtacggaacgcctacctgacgacccagcaggatgtgctcacgagtctgcggcatcgggccgtcagtcgcagcaacaaccaggatcgcgccatccatctgagcagcaccggtgatcatgtttttaacatagtcggcgtggcccgggcagtctacgtgtgcgtagtggcgagtcggggtgtcatattcaacgtgggaagtgttgatggtgataccacgagctttttcttccggcgcgttatcgatctggtcgaatgcgcgagcagcaccgccgtaggttttagccagtacggtagtgattgcagcggtcagcgttgttttaccatggtcaacgtggccgatagtaccgacgttaacgtgcggttttgtacgttcaaacttttctttagacatcgattgtccctctaagacacggataaatcggtgatatcaccacatcaaccaggcaacatgcccgacttgttgaatgtaataaacagagagaaacagggaaggagagataaagaagtggtgctgatacccagagtcgaactggggacctcacccttaccaagggtgcgctctaccaactgagccatatcagcacgtctggagcgggcagcgggaatcgaacccgcatcatcagcttggaaggctgaggtaatagccattatacgatgcccgcatcctgaaactcggctacccagttctttctgtaacaaaaaagagattgctctctttaatgttgagctgattagtttacccaaccaactccggctacgcaaagcgtcgcccgaaagtggtggtggggaaggattcgaaccttcgaagtcgatgacggcagatttacagtctgctccctttggccgctcgggaaccccacccaaattgttatggtgccgactaccggaatcgaactggtgacctactgattacaagtcagttgctctacctactgagctaagtcggcatcaagtagcgcgcattctagggagacctgcgagttcatgcaactaaaaatttgcataaaacgttctcttgctcacattttgtgctcttatgcgaaaaaacggtgtaatttcaaacaatggagtgcaaaaaaaacgcacatctcaacgcagaatttgtttcactgcgcctgtcagacacaagaatgacggttttttcacctgcaaatcctgatggctaacacgatcgctaacctgcaaagatagcagactcgctttcttccctctttctacttattcatcacttgtgatgctgctatgagaaagcgcccttcgatgagtttttttcttattattcccggcattctggtgttaccctcctgcccattgtcctgattaactagtgtgaagcatcaccgctacctctttttcggtgatagtaagaacatgcttatgagcaaaaaagagcagacgttaatgacaccctatctacaatttaaccgcaaccaatgggctgcacttcgtgattccgttccgatgacgctgacagaggaagaaatcgcgcggttaaaaggcatcaacgaagatctttcgctggaagaagtcgccgagatctatttgccgctgtcacgtttgctcaatttctatatcagttccaacctccgtcgccaggcggtgcttgaacaatttcttggcaccaacggccagcgtattccttacatcattagtattgcaggtagcgttgcggttggtaaaagtacaacagcacgtgtcttacaggcgctgcttagccgctggccggaacatcgacatgttgaactgataactaccgatggcttcttacatcctaactcggtgttaaaagaacgcggcttgatgaagaaaaagggcttcccgcagtcctatgatatgcatcggttggtgaagtttgtttctgacctgaaatctggcgtaccaaatgccaccgcgccggtctattcccatctcatttatgatgttattcctgatggtgataaaaccgttgctcaaccggatattcttattctggaaggtttgaacgttctgcagagcgggatggattatccgcacgatccgcatcatgtatttgtttctgactttgtcgatttttctatttatgtcgatgcgccagaagatttattaaagaactggtatatcaaccgcttcctgaaattccgtgaaggcgcttttaccgatccggattcttatttccataattatgccaaactctcaaaagacgaagcggtcaatattgccacttcattatggaatgagatcaacctactgaatttaaaagaaaatatattaccaaccagagagcgagcaagcttgattatgaccaaaagcgcaaatcattcggtcgatcaagttcgtctacggaaataaaaaagggagcgcaagctcccttctgtttattcagcgctacgcagcgatatctcgcctccaacccatggtttaattaccccgtcctgctcgagtaataatgccccttgcgcatcaattccgcgagaaataccaaatatttccttatcaccaataatcagcttcaccggccgattgataaagttatccagtttttcccagcgtggcaggtaaggtgttaatccttcttgttcaaatagctgcaaaccggtacgtaatgctttcaccagacgcgccgtcagggtattacggtcaatgaagactcccgcctcctggaggctgatccacccctgattgacaatgtcagactcaacgcggcgcatcacgaggttgataccagcgccgctgacgatttgcgcggcatcaccggttttgcctgtcagctctaccaggataccggacaacttgcggtcctgcagatagatatcattcggccatttgacccgtacgttatccgcccccagactctgcagcacttccgcaatcacaatgccgatcaccaggctcaaaccaatcgcagcagccgggccttgttccagacgccagtacatggagagataaagattagccccaaacggtgagaaccacttacggccacgacgaccccggccagcctgctgatattcagcaacacaggcatcacctgactccagttcatccagccgatccagcaaatactggttggtagaatcaatcaccggcagcacggtaatgcggccttgttcaatctgcccggcaatcttttgctcatccagcaattcaatcggctcagggaggctatagcccttccctggtacggtaaacacatcaacaccccagtcgcggagcgtctgcatatgcttgttaattgccgcgcgactcatccccagacgttcgccgagctgttcgccagagtgaaactcgccatccgccagaatagagataagcgtcaggggtacggtattgtctttcatgcaatcacctcttccgcgttcacttcaccctgctctccgatgaagcgcacttcaggctggagccaaacgttaaatttctcgcccacctgcaggcggacatagtgtgctaaccccacgacatcatcgctggtcgcctggttatcgttgatcagcaccagcgcctgctgacggtgaacggcagccccaccgatcgttttgccttttagctggcactggtcgataagccaaccggccgccagtttaacgctgccgtcagcctgtggataatgcggcgcgttagggaatgcagccagcaatgcctgagcaacctgtgcgctgacaatcgggttcttaaagaagctaccggcattaccattcactttaggatccggtaatttggtcatacgcatatggcaaacagcgtcgaatacctggcgtggggtaacagtttgcggatcgagacgggttaaatcgccgtagctcaggacaggctgccacgcttttaccagccgtagcccaacagccactatcgcgtaacgatcctgatattcatgtttgaaaatactgtcgcgatagccgaaacgacactctgcggcagagaggcgctgcttgcgacccgtctcaagttcgatacagtctacgtattcacatactcgctgtagctcgacaccgtaggcaccaatattttgaattggcgaagaccccgcgcagccaggaattaaggccaggttttccagtccaggcattccattttccagcgcaaattgcaccagttgatgccagttttcaccggcgccaacgtgcaaacgccaggcttcagacgtttcgcttacctcgatccccataatgcggttgatgatcaccgtgccggaatagtctttcaggaacagaacgttgcttccttctccaaggatcagacaaggttggtgttctgcagcggcggcttgccaggcagccagcaactgttgttcattttcagcaagtacaattgctttggcagaatggctaatgccaaaggtattccagggtttgagggagaggttcatagtggcttcctgatgcaaaatcagcattagtttaccgtatatagacagggaaggcttgcctgaataataccggttctgaaccgggtttttcttgtcatgggcgttatggaatggggccggcaggcaggatgttttcccgcaggcggcgcaggccggggaacgatcggcagccccggtaagcgcagcgccaccgggggtgccatcgtgtctggccacaaaacacaaaaacaaaaggcccagtcttccgactgagcctttcgttttatttgatgcctggcagttccctactctcacatggggagaccccacactaccatcggcgctacggcgtttcacttctgagttcggcatggggtcaggtgggaccaccgcgctgtcgccgccaggcaaattctgttttcaacacgtcctcaggacgcatcgattaatctgtatcaggctgaaaatcgtctcaaatccgccaaaacagcttcggcgttgtaaggttaagcctcacggttcattagtatcggttagctcaacgtatcgctacgcttacacacccgacctatcaacgtcatcgtctttaacgttccttcaggactctcaaggagtcagggagaactcatctcggggcaagtttcgtgcttagatgctttcagcacttatctcttccgcatttagctaccgggcaatgccattggcatgacaacccgaacaccagtgatgcgtccactccggtcctctcgtactaggagcagccccctcaattctccagcgcccacggcagatagggaccgaactgtctcacgacgttctaaacccagctcgcgtaccactttaaatggcgaacagccatacccttgggacctacttcagccccaggatgtgatgagccgacatcgaggtgccaaacaccgccgtcgatatgaactcttgggcggtatcagcctgttatcccggagtaccttttatccgttgagcgatggcccttccattcagaaccaccggatcactatgacctgctttcgcacctgctcgcgccgtcacgctcgcagtcaagctagcttatgccattgcactaacctcctgatgtccgaccaggattagctaaccttcgtgctcctccgttactctttgggaggagaccgccccagtcaaactacccaccagacactgtccgcaaccccgatcaggggccaacgttagaacatcaaacattaaagggtggtatttcaaggttggctccacgcagactggcgtccacgcttcaaagcctcccacctatcctacacatcaaggctcaatgttcagtgtcaagctatagtaaaggttcacggggtctttccgtcttgccgcgggtacactgcatcttcacagcgagttcaatttcactgagtctcgggtggagacagcctggccatcattacgccattcgtgcaggtcggaacttacccgacaaggaatttcgctaccttaggaccgttatagttacggccgccgtttaccggggcttcgatcaagagcttctccttacggataaccccatcaattaaccttccggcaccgggcaggcgtcacaccgtatacgtccactttcgtgtttgcacagtgctgtgtttttaataaacagttgcagccagctggtatcttcgactgatttcagctccatccgcagggacttcacctacatatcagcgtgccttctcccgaagttacggcaccattttgcctagttccttcacccgagttctctcaagcgccttggtattctctacctgaccacctgtgtcggtttggggtacgatttaatgttacctgatgcttagaggcttttcctggaagcagggcatttgttacttcagcaccgtagtgcctcgtcatcacacctcagcgttaaaaaggtaccggatttacctggaacctccgcctacatgcttaaaccgggacaaccgtcgcccggctaacatagccttctccgtcccccttcgcagtaacaccaagtacaggaatattaacctgtttcccatcgactacgcctttcggcctcgccttaggggtcgactcaccctgccccgattaacgttggacaggaacccttggtcttccggcgtgcgggcttttcacccgcattatcgttacttatgtcagcattcgcacttctgatacctccagcaaccctcacaggccaccttcgcaggcttacagaacgctcccctacccaacaacacatagtgtcgctgccgcagcttcggtgcacagtttagccccgttacatcttccgcgcaggccgactcgaccagtgagctattacgctttctttaaatgatggctgcttctaagccaacatcctggctgtctgtgccttcccacatcgtttcccacttaactgtgactttgggaccttagctggcggtctgggttgtttccctcttcacgacggacgttagcacccgccgtgtgtctcccgtgataacattcttcggtattcgtagtttgcatcgggttggtaagtcgggatgaccccctagccgaaacagtgctctacccccgaagatgagttcacgaggcgctacctaaatagctttcggggagaaccagctatctcccggtttgattggcctttcacccccagccacaagtcatccgctaatttttcaacattagtcggttcggtcctccagttagtgttacccaaccttcaacctgcccatggctagatcaccgggtttcgggtctataccctgcaacttaacgcccagttaagactcggtttccctgcggctcccctatacggttaaccttgctacagaatataagtcgctgacccattatacaaaaggtacgcagtcacaccctaaagggtgctcccactgcttgtacgtacacggtttcaggttctttttcactcccctcgccggggttcttttcgcctttccctcacggtactggttcactatcggtcagtcaggagtatttagccttggaggatggtccccccatattcagacaggataccacgtgtcccgccctactcttcgagttcacaacctgtgcattttggtgtacgggactatcaccctgtaccgtcggactttccagaccgttccactaacacacaagctgattcagactctgggctgctccccgttcgctcgccgctactgggggaatctcggttgatttcttttcctcgggtacttagatgtttcagttccccggttcgcctcgttaacctatgtattcagttaacgatagtgcaacgaattgcactgggtttccccattcggacatcgccggctgtaacggttcatatcaccttaccgacgcttttcgcagattagcacgtccttcatcgcctctgactgccagggcatccaccgtgtacgcttagtcgcttaacctcacaacccgaagatgtttcgtaaaacattttcgtgtcgcgaaaatttgagagactcgaacacacattaactgtgtgtcgtttcaattttcagcttgatccagatttttaaagagcaaaacttcgcagtgaaccttttcaggtacactctgaagttttcttgttttttgcagtaaggatggtggagctatgcgggatcgaaccgcagacctcctgcgtgcaaagcaggcgctctcccagctgagctatagccccatcgtagttatctcttttaaccttaattcgttttcgggcgcggcgtggtgaagcgaagcatactgaagtatgcgagctttgccacaacaaagcacgagagcgaatttggtaggcctgagtggacttgaaccaccgacctcacccttatcaggggtgcgctctaaccacctgagctacaagcctgcagagattacttactgctgtattttcatcagacaatctgtgtgagcactacaaaggcaggttctttaaggtaaggaggtgatccaaccgcaggttcccctacggttaccttgttacgacttcaccccagtcatgaatcacaaagtggtaagcgccctcccgaaggttaagctacctacttcttttgcaacccactcccatggtgtgacgggcggtgtgtacaaggcccgggaacgtattcaccgtagcattctgatctacgattactagcgattccgacttcatggagtcgagttgcagactccaatccggactacgacatactttatgaggtccgcttgctctcgcgaggtcgcttctctttgtatatgccattgtagcacgtgtgtagccctactcgtaagggccatgatgacttgacgtcatccccaccttcctccagtttatcactggcagtctcctttgagttcccggcctaaccgctggcaacaaaggataagggttgcgctcgttgcgggacttaacccaacatttcacaacacgagctgacgacagccatgcagcacctgtctcagagttcccgaaggcaccaaagcatctctgctaagttctctggatgtcaagagtaggtaaggttcttcgcgttgcatcgaattaaaccacatgctccaccgcttgtgcgggcccccgtcaattcatttgagttttaaccttgcggccgtactccccaggcggtcgacttaacgcgttagctccggaagccacgcctcaagggcacaacctccaagtcgacatcgtttacggcgtggactaccagggtatctaatcctgtttgctccccacgctttcgcacctgagcgtcagtctttgtccaggggccgccttcgccaccggtattcctccagatctctacgcatttcaccgctacacctggaattctacccccctctacaagactctagcctgccagtttcgaatgcagttcccaggttgagcccggggatttcacatccgacttgacagaccgcctgcgtgcgctttacgcccagtaattccgattaacgcttgcaccctccgtattaccgcggctgctggcacggagttagccggtgcttcttctgcgagtaacgtcaatcaccaaggttattaaccttaatgccttcctcctcgctgaaagtactttacaacccgaaggccttcttcatacacgcggcatggctgcatcaggcttgcgcccattgtgcaatattccccactgctgcctcccgtaggagtctggaccgtgtctcagttccagtgtggctggtcatcctctcagaccagctagggatcgtcgcctaggtgagccattaccccacctactagctaatcccatctgggcacatctgatggcatgaggcccgaaggtcccccactttggtcttgcgacgttatgcggtattagctaccgtttccagtagttatcccctccatcaggcagtttcccagacattactcacccgtccgccgctcgtcacccgagagcaagctctctgtgctaccgctcgacttgcatgtgttaggcctgccgccagcgttcaatctgagccatgatcaaactcttcaatttaagtttgatgctcgtgaattaaacttcgtaatgaattacgtatgttcactcagagacttggtattcatttattgtccgaagacattaagaatccatgtcactttgagtgcccacacagattgtctgataaattgttaaagagcagtgccgcttcgtttttcgctgcggcgcggggtgtgcatattacgctttcccgcctcagagtcaagcatttatttttgcttttctccgcgaggttctcaccggaaccccgctgacccggcggcttgtttgccgttgttccgtgtcagtggtggcgcattatagggagttctgagacgttgacaagccctgttttcaaaaaacttttcaaccgtcttttttttgcgcaaaacgcctttaaagcggtagtttttccagcgtttcaaagccataacgctgtaaaacgggtaaaagctgttcagtatccggggtaatcgccatgcaaaaagccttattggcatcattcgattttgcatccggcgcttcatgctccaacaaccaggcggtgcgtcgagcaatcgccgcgccggaatcaataaaccgcgttccttccggcataacctgttgcagctcttccgccagtagcgggaagtgcgtacaacctaatacgaccgtatcgggcggctcctgcatccgtagccacgggcgcagaattcgacgcagctcttctaacggtaccgcttcgccgtgcagcttcgcctctgccagttccaccagctcagcagaacccagcatttcgatgcggcattcattggcaaagcggtcaatgagttcacgggtataaggacgcttgacggtgccgcgcgtcgccagcaggccgacaataccgttcgccgttaagcgcgcggcaggtttaatcgccggtacgacgccgaccaccgggaaagcgaacttttcacgtagggctggcagggaaacggtactggcggtattacaggcgatgaccgccagcgccagaggatagcgttgctgaacggcagtcacgatttcaacaacacgctcaacgataaactcttcgctcttctcgccataggggaaggcaacgttatcgaaagcataaatataatgtagatccggcagcagttgccgaatctcgttatataccgacaacccaccgacgccggaatcaaacaccagcacggtgggacgtggatcagaaggtgtagctgccagacaaggtatattcccgtcctgcagtttggtagccatatactgtctcgtaatctttatcgaacaggttggctattttaccacgaactgtgagatgtgaggtgactggatacgaaactgcgagatcccacaagcttacgccgcccaacttaacgctctcaggcgcataggttaccgggtcgtaagtgttgtcataacgggtgccaagatagtgataggtcaccccccagtcgaaatcataaacctgccagtccaactggtatttcacctgctgttttgcccggcgcaccagcagctcgttggttttcgcatcacgcgcatcgacatagtcatagctgatgctgtgcgccagcggcccggtatcaaacgacgccgtcgcttcaatacctttaatacgcgccttgccgacgttgtaatatttcttcagctgcgagtcgtagtcgatcagattatcgatgtcgttacgatatccggacaggcgccacgtcaccccagacgtcaggccttcaaaggccccttcccactgcttgctctcttccgggtcgagattctgattaccgtagaagccgtacagctggccgagattcggcgctttgtaggcggtgccataagaggcgataaagcgatagccgtcgataaactcccacgcggcgctgctctgccaggtaccatgctggccaaactgcgagttatcatcactacgcgccgccccctccagggtgaaatcgcccaacttttgcaagccggtgataaacaggccggtattacggatttcatagccatcggtcacatagttcgtgccaggctcggtggtttgtttttgccagtcgattccagcgccaacgttgccgtggccaacatcgaccgtgttcgcccactgcacgttgtactgtttcacttcatccagcgtcgccgaggtgtcatagcgccccagtcgcggatcgtaattgtagtccttactgtggctatagctggaagtcaactgcgagtggaagatatcctgattaaaacgcaggccggcatcccaggtctggctatacaactggcgagtgtcgactaatacgccgccataaggagagccgtcgtaggccgtccggttgtcatagccatatccgcgcacaaagccgctccactcattggagaaactatgctccagcgcgccgtagatcgttttgctcataaagccatcgcgatccggctggcgaacgccgccggtattgccttccgcaaccacatcaaatcctttggtataggtgtagtctcccgccagggtgacgcgggtatgaccgccgaaagtctgctgcgtgctgccgccatagttctggtagccatttgagcccacgccggcattgagcgtggtgccgtcctggtcgcgagtggtaataatgttcaccacaccgccaatcgcgtctgagccgtagaccgccgagcgcgggccgcgaacgtattcaatgcgctgtaccagagcgatagggaactggcttaagtcggaagagccgctgacgcccgcctgattcagacgtacaccatccaccaggattaagacatggctggagttggtaccgcgtacgaaaagagagctctgctgccccatgccgccgttttgcgcgatgtccacgcccggcaggcggcgcatcacatcggtgagagaggttgactgccagcgatcgatatcctgccgcgtcaccacgctcaccggcgccagcacggtctcgataggttgcgccacacggtttgccgtcaccactaacgtatttgaattgctgtcctgcgcccagccggaaaatgccgtgacggataaagccgtcatcagcgaagcttttttaatcattgtaaaagcatccataatatagagaggatgccgccggctctatcagtagctcgcgatgatagaaaccaaatgcgacgtatccggcaggtcttcgggcttggaggctgctttaagaaataatgacttcccacggctaaccgcagtgtctgcaccgagtgcgcttatttctcgcctttccttaccgctgcgcgtcagctccagattcgcactggattccctattaactcagaggaccggttgcaagatgctacaattagaaacatatagatgtccagactgctataacgatatttcatccgcaaccagggctggacatccccaatgctttccctacaatccccgcgtacttattttattcaggatgcatcatgaccccgaacaccttcctaccgagcaatacgaagcgcaactggcagaaaaagtcgtccgtttgcagaaaatgatggccccttttgccgcgccggttccggaggtgtttcgttccccggtcagccactaccggatgcgcgctgaatttcgcctgtggcacgacggcgacgacctctatcacatcatcttcgatcagcagaccaagtcgcgtattcgcgtcgataccttcccggccgccagcgagctcatcaaccagttgatgccggcaatgctcgacggcgtgcgccataacccgatcctgcgccataagcttttccagattgattatctgacgaccatgagcaaccaggccatcatctctctgctctatcacaagaagctcaatgacgagtggcgtcagcacgcggaagcgctgcgcgatgccctccgcgcgcaaaacctcaacgtgcagctgattggccgcgcgaccaaaaccaaaatcgagctcgatagggattatgtcgatgaacgtctgccggttggcgggcgcgaaatgatttatcgtcaggtagaaaacagctttacccagccaaacgcggcgatgaatattcagatgctggagtgggcgctggacgtcaccaaagattccaccggcgatctgctggagctctactgcggcaacggcaacttctcgctggcgctggcgcgtaacttcgatcgcgtgctggcgacggaaatcgctaaaccgtcagtcgcctccgcgcaatacaatattgccgccaaccatatcgataacgtgcaaattatccgtatggcggcggaagaatttacccaggcgatgaacggcgtgcgggagtttaaccgcctgcagggcatcgatctgcaaagctatcagtgcgaaaccatttttgtcgatccgccgcgcagcggtctggatagcgagacggaaaaaatggtccaggcgtatccacgaattctgtatatctcctgcaacccggaaacactgtgccagaacctggaaaccctcacccagacgcacaatgtcacccgcctggcgctattcgatcagttcccgtatacccaccatatggaatgcggcgtactgttaacgaagaaataaacgcataaaaaaacccggcgaacgcaacgttgccgggttattgcctggcggattactccgccgcggtatctttgcggttgcgcatcttgtaaccgatccagaacaccatcgcgacagacagcaccgccgggaagaagttagagccgatatccggatattctgcgcgcaccacggtgctatacagcagaacgccgagaataaagcaggcggcggaaagtcccggcagaccgaccggcatactgcggttttgatagcgctggtgcaggcagtataccgtcagcagcagcgacagaaccgggaagatggaaaagggaacgattgagctgaacagcgcggcgaaggtgccattaatggacagacccgcgatcagcgccagcagtagcgtacctttatcttgaactgagtgtttcattgctcgtccttcacgttattcggaatgatgtgacattttttcttgttcacggcgataccagtaatacgcgccttttgaaatcattctgagctgcagtaccagccgctcttccagctgtcggcgctgctccggactgacgtccaacgcttccgcaccggcgttgaatacgatggtgaccatagcttcagcctgcgcttcggtaaaggcgcgcggcatatggttttcgagttctaaatagtcggcaagttccgcgatgaaatgctggatctcgcgcgctacagcggctcgaaacgccgcggatgtgccagaacgctcacgcaacagcaggcggaaggcgttcgggttgttaccaataaactccataaaggtagagacggaggtgcggatcacgctgccacctttcgcaatgcgctgacgcgcctggcgcatcagttggcgcagcattagcccgctttcgtctaccatcgtcaggcctaactcatcgacatcgcgaaaatgacgataaaaggacgtcggcgcgatccctgcttcccgcgcaacctcgcgcaagctcaggctggcaaagcttcgctcagcgctaagttggctaaatgccgcttccaccagcgagcggcgggttttttctttttgttgtgctcttacgcccatcacgatgtatgaatccttccaatagccctgtcggcactataccagagattaaaactaatcggtttgtactggattgtgaatgattgtttatgagccgtttctgcttttatgccgcaaaaaagcacaacgataattgggttaaagctcgccaaatgttatcatcgtgtttattttgtgtataaaacaggtgagtaatgccatgtcacactcttgggattatgatgcaatagtgattggttccggtcctggcggtgaaggcgccgctatgggactggtgaaacagggagctcgtgttgccgttatcgagcgctaccataatgtcggcggtggttgtacccactggggaaccatcccgtcaaaagcgcttcgccatgccgtcagccgtattatcgagtttaaccaaaaccccctctacagcgaccattcccgtcttctccgttcttccttcgccgacatcctcaaccatgccgacagcgtcattaaccagcaaacccatatgcgtcagggtttctatgagcgcaaccactgcgaaattctgcagggcaacgcccactttgttgatgagcacacgctggcgctggagtgtcacgatggcaccgtagaaacggtcaccgccgagaaattcgttatcgcctgcggctcgcgcccgtatcatccggccgatgtcgatttccaccacccgcgtatttacgacagcgattccattcttagcctgcaccacgaaccgcgccacgtgatcatttacggcgccggggtgatcggctgcgagtacgcgtcgatcttccgcggtatggaggttaaggtcgatctgatcaatacccgcgatcgtctactggcgttcctcgatcaggagatgtccgattcgctctcctatcacttctggaacagcggcgtggttatccgccataacgaagagtacgagaaaatcgaaggcgtcgatgacggcgtgatcatgcatctgaagtctggtaagaagctgaaagctgactgcctgctgtacgccaacggtcgtaccggtaacaccgatacgctggcgctggaaaatatcggtctgcaaaccgacagccgcggccagcttaaagtgaacagtatgtatcagaccgccctaccgcacatctatgccgtcggtgacgttatcggttatccaagcctggcgtcagcggcttacgatcaggggcgcatcgccgcgcaggcgctgatcaaaggcgaagcctccgcgcatctgattgaagatatcccgaccgggatctataccattccggaaatcagctcggtgggtaaaaccgagcagcagctaaccgcgatgaaggtgccttatgaggtaggtcgcgcacagtttaaacatctggcgcgggcgcaaatcgtcggtatgagcgtgggtacgctgaagattctgttccatcgcgagacgaaagagatcctcggtatccactgctttggtgagcgcgcggccgaaattattcacatcggccaggcgattatggagcagaaaggtggcggtaacaccattgagtacttcgttaacaccacctttaactacccgaccatggccgaagcctatcgggtagcggcgttaaacggcttaaaccgcctcttttaacgccttatcgaagtggccatccatagtactgcggatggcctccgccagatgctcatagcggctacgcagcggcgaaccaggacgataaaccagcccgatggtgcgtcttggttccggcttaatgcacggaatatagaccacgccatcgcgttttctctcctgtggcaccgccagcgcaggcagcagcgtgataccacttccggcggcaaccatgttgcgcagcgtttcaaggctggtcgcccggaagtgggtatcttcatccgcccccgcttcaaagcagaagcccatcgcctggtcgcgcagacagtgcccgtcttccagcatcaacagcttttcgcccgctaaatccgccatcggcacgcgatcgcgctctgcccacggatggtcttcatagatagccagcatcatcggctcatcgaacagcggcacctcgataaaggcttcactctctttgaccagcgcgaggatcgcgcagtcgagtttaccgctatcgagctgcgccagcagctgatgggtttgcgcctcatgcagatacatttccagcttcgggaaagtctgatgcagcatcggaattatgtgcggcagcaaatatggccccaccgtcgggatcaggccgatatgcagcggcccggacatggtttccccttgctggcttgccatctccttgagcacttttacttcgcgtagcacggtacgcgcctgatcaaccagcagcaaacccgcctgagtgaacaaaaccttacggctggtgcgctccagtaacatcaccccaagttcatcttccagcttgcgaatttgtccgctgagcgtgggctgactgacgtggcaggaatctgccgcacgtcggaagtggcgatgttcagccagcgctaccaggtattcaagatcgcgaatattcattattcatcctccatcgccacgatagtccatggcgatagatagaatagcaacgaacgattatccctatcaagttttctgttcaataataaccacagaaacgaggagaacatctgaaaatcattgagtcgcctcacagtttccctacccgaacaactaaagccaacgtgaacttttgcggacttcgtgtccgcttttttttgcgtaaaaaagcccggggattacccaggctcattcaacatcggtgtaatttacatcaggcgctgtctggcatcggcaatcgcctgcgccacctgctgcggcgagacgccgcctttagccgcacgtttatcgaggcaggactgcaacgacaggatcgggtagacgtcatcgccgataacattgctgaacttttgcaagtcgcttaatggtaaatcttccaacgctttgccctgagcaatcgcttcaaccaccgcttcaccgacgatatggtgtgcttcgcggaacggaacgccttttgccaccaggtaatccgccagctcggtagcgttggcgtaaccctgctgcgccgcttccgcacagcgcggacgtttcacctggataccgtccagcaccagcgccgccatgtgcaggcagtcgagccaggtgtccagcgcatcgaacagcccttctttgtcttcctgcatatctttgttgtaggccagcggtagtcctttcagggtcatcatcatgccggtcagcgcgccctgcacgcggccgcatttaccgcggatcagttccagcgcatccgggtttttcttctgcggcatcagtgacgaaccggaggtgacgcggtcagagagttcaacaaaacccgcttcgccggtattaaagaaaatcagatcttcggcaaaacgcgacaggtgcaccatgccgatagaggcatcggaaagcagttccagcacgtgatcgcgatcggagacgctatcgaggctgttacgggtcgccgatgcgaaacccaaccaaccggccagctgctcacggtcgatttcataagcggttcccgccagcgcgccgcatcccagcgggctgacatcgaggcgcttgagcgcgtcctgcagacggctttcatcacgggccagcatttcaacgtaggccagacaccagtgcgcaaaagtcaccggctgggcgcgctgcagatgggtataacccggcatcaccgcatcctgattgttgccagcggtttccaccagcgcgctttgcagttggcgggtcgcggacagcagctcggtgacggtctctttgcaccacagcttgagatcggtggcgacctggtcattacggctacgtccggtatgcagttttttgcccaactggccgactttatcgatcagtttcccttcgacccagctatggatatcttcggcatcgctttcaaggatttgctgcgggttggcgcgtacctcttccagcagaacgttcagcgcctcttccagctgcagctgctcatcggcggtcagtacgcctacggttaccagcgctttggaccaggcgacggatcccacgatatcctgttctgccagacgatagtcaaagcgtaaagagtcgttgaattgtttgaaccgctggtctgctgcctgtgtaaaacgcccgccccaaagtgccataacatgcttcctttattcgtgagttctgccgggtcgcgctgcgcttacccggcctacggtcttgtcgccccggcaagcaacgcgccgccgggcattcaatcttaagccaaaatacgcgtaccgatcggcgtaccgttaaataatgccggcagctgctcggcatggcgccaggaggcgatatccaccgggcggcccagctcgcgcgccgcgtccagcgccgcgttcactttcacgatcataccgtcggtaataatgccctgttcaatcagttgttcagccctggaggcggtcatttccgcaatccgctgacctttaccgtcgagaatgccgctaacatcggacagcaggataagatccgcgcccagcgtcgccgccagcgccgttgccgcctgatcggcgttgacgttcatcagttgtccttcgtcggtgacgccaatcgagctcacgacgggcaggtagccgcccgccaacagcgtattgataagcgtcggcgagcctgcctgcgctttaccaacgtggcctagttcttcatccaactgagtcaccttcacgctatcgccatcgccgaggaacagccctaccgaggaaagaccatgctttttcgcccatgccagcagcgttttgttggcggttcccgccagcgcgccggtaatgatgtcaatctgatcggcaggcgttacgcgcaggccatttttctttttcaccggcagattaagctgtttcatcagctcatccaccacgcatccgccgccgtggacgataaccagcggacgctggtgtgtttcgcggtaatgcaccagcgcagtaaacagacgctccagcgcttcttcgctatccaataacacgccgccaagtttgataatcaatggattgttcatcatcacaccttaaattaaagactgcgtctcagcgaagccgaaacgaatgttagcgcactgcacggcctgcgctgccgcgcctttcagcaggttatcttctgcggccacgacgataatatgttcgtcctggacggcaaaaccgatatcacagaatggcagcccaactacgtttttcagcgccggtacgcctttatcgtataaacggaccaacggcttattggcataggcctgctggaagacctcagccacctgatctttaccgacgcccggcttcaggcggcaggtaatggtttccagaataccgcgtttaaaattgcccaaatgggggtgaagatcacctctgcgcccagatgagtggcaatttctggatgatggcgatggttgaaaacgccgtacggatgcaggctgacttcacagaagctattgctcatcgccgccttacgcccggcgccgctgacgccgctggtggcgttgatcaccggccactgcttcagatccagcagaccggcatcgatcagcggttttaacgacagctgcgccgccgtcgggtagcagccaggcaccgcgatcaaattcgcctctttcaatgcttctacgttccactcggccagaccgtataccgcctgcttaagcagatcggaatgctgatgcgtgaaaccgtagtatttttcgtagaacgcgccatcgttgacgcgaaacgcgccggataaatcgaacaccacgcagcccgcggccaaaaactgcggcgccagatcgtggctaacttcatgcgcggtggcgagaaacaccacatccgcgccggcgctaaattcgctgatatcggacattgcctgcagcggcaaatcgacaatgcctttcaactgcggatgtatatcggaaattaactttcctgcatcattgctttgcgcggagacggtcaaagcggttatgttcatatgagggtggcgatttacataggccaccagctctgcgccggcatagccgctagctcccacgatcagcgtatttagcattggaagagcatctccttacattcgatgggttttattgcgctcaacgatattgtatttttattcacaaatactgcatgaatattgatactatcatgaccagaggtgtgtcaacaatgaaaaacaatttaccgccctttatcgagatttaccgcgcattgatcgccacaccttccatcagcgcgaccgaagaagcgctggatcaaagcaatgagtctttaatcaatttactcggcggctggttccgcgatctgggctttaacgtcgagatccagccggtacctgagacgcgcaataaattcaatatgttggccagcaccggccacggcgctggcggcctgctgctcgccgggcataccgataccgtgcctttcgatgatggtcgctggacccgcgacccgtttacgcttaccgagcacgacaacaaactctacgggctcggcacggccgatatgaaaggcttcttcgcgtttatccttgatgccctacgcgacgttgacgtcagtaaattgaaaaaaccgctgtatatactggctaccgctgacgaagaaaccagcatggcgggcgcgcgctacttcgccgaaaccacacaactgcgcccggattgcgccatcatcggcgagccgacctcgctgcagccggtgcgggcgcataaaggccacatttcaacagcggtacgcgtactgggacagtccggccactccagcgacccggcgcgcggcgtgaacgctatcgaactgatgcacgatgcgattggccgcatcatgcaactgcgcgatgacttaaaagagcgttatcactatgccgccttcaccgtgccttatccgacgctcaacctgggtgccattcacggcggcgatgcatccaatcgcatctgcgcctgctgtgaattgcacatggatattcgtccattgccagggatgacgcttaacgacctgaacggcctgctggatgaagcgctggcgccggtcagcgaacgctggccggggcgtctgacggtctctgagctgcatccgccgatccctggctatgaatgcccgccggaccacaagctggtcgaagtggttgaaaaactgctcggcgcgcagaccgaagtggtgaactactgcaccgaagcgccgtttatccagacgctgtgtcctacgctggttttaggaccgggctctatcaaccaggcccaccagccggatgaatatctggagacgcggtttattaagccgacgcgcgaactcatcacccaggttgtccatcacttctgctggcattaatcgctgctagtttcccgccttcacgtccggaggcgggagagtgacgatcgtcacacttccataagtaatgcttatccgccgaccgctgagttaactttcgcaaattatcgccatttattcgtttgctgaagcgatttcgcagcaattgacgcggggtatttacgtggctttataaaagacgggttgcttatccactgctcaaatcacggagcgccggatataacaaaataaaatgagatggggtgtctggggtaacatgaacgaacaatattccgctttgcgtagtaatgtcagtatgctcggtaaggtgctgggcgacaccatcaaggatgcgttaggagaaaacattcttgatcgtgtcgaaactatccgtaagttgtccaaatcttctcgcgcgggcaatgaagccaatcgccaggagctgctcaccacgctgcaaaacttgtccaacgacgagctgctgccggtggcgcgcgcctttagccagttcctgaatctggccaataccgctgagcaatatcacagcatttcgcccaacggcgaagccgccagcaatccggaagttattgcgcgtaccctgagaaaactcaaagaccaacccaatctcaacgaagacaccataaaaaagcggtggaatccctgtcgctggagctggtattaaccgctcacccgaccgaaatcacccgccggacgttgatccacaaaatggtggaagtcaacaactgccttaagcagttggataacaaagatatcgccgactatgagcacaaccagctgatgcgccgcctgcgccagctgatcgcccagtcctggcataccgatgaaattcgtaagcaccgcccttctccggtcgatgaagccaaatggggtttcgcggtagttgaaaacagcctgtgggaaggcgtgccgaactatctgcgcgagctgaacgaacagctggaagccaacctcggctaccagctaccggttgattttgtgccggtacgcttcacctcctggatgggcggcgaccgtgacggcaacccgaacgtcaccgccgatatcacccgccacgtgctgttgctcagccgctggaaagcgaccgatctgttcctgaaagatatccaggtgcttatctccgagctgtcgatggtcgaatgcaccgacgagctccgcgatttggccggcgcggaaggcgcgcaagagccgtatcgttatctgatgaaaaagctgcgtagtcagttgatggagacccaggcctggctggaagcgcgtctgaaagggcaaaaactgccgaaaccggcaggacttatcacgcaaaacgagcagctgtgggaaccgctgtatgcctgctataaatcgctgcaggcctgcggaatgggcatcatcgccaacggcgagctgctcgataccctgcgccgggtgaaatctttcggcgtaccgctggtgcgtatcgatatccgtcaggaaagcacccgccataccgaagcgctgggcgaaatgacccgctacctcgggatcggcgattatgaaagctggtcggaagccgacaagcaggccttcctgatccgtgagctgaactccaaacgcccgctgctgccgcgtcagtgggagccgagcgaagagacccgcgaagtcctcgacacctgtaaagtgatcgccgaagcgccgcgcggatcgatcgccgcttatgtgatctcaatggctaaaacgccgtccgacgtgctggcggttcatcttctgctaaaagaagccggtatcggtttcgcgctgccggtcgcaccgttgtttgaaacgctggacgacctgaacaacgccaacgacgtcatgactcagttgctgaatattgactggtatcgcggctttattcagggcaagcagatggtcatgatcggttactccgactcggccaaagatgccggcgtgatggccgcctcctgggcccagtaccaggcacaggacgcgctaatcaaaacctgcgaaaaagccggtattgaactgactctattccacggtcgcggcggctccatcggtcgcggcggcgctccggcccacgcggcgctgctctcgcagccgccgggcagcctgaaaggcggcctgcgcgtcaccgaacagggcgaaatgatccgctttaagtacggcctgccggaagtgaccatcagcagcctgtcgttgtacaccagcgcgattctggaagccaacctgctaccgccgccggaaccaaaaccgcagtggcgcgaaatcatggccgagctgtccgacgtctcctgcaagatgtaccgcggctacgtgcgggaaaacaaagacttcgtcccttatttccgctctgcgaccccggaacaagaactgggcaaactgccgcttggctcgcgcccggcgaagcgtcgcccgaccggcggcgtcgagtcactgcgcgccatcccgtggatcttcgcctggacccagaaccgcctgatgctgccggcctggctgggcgccggtgccgcgctgcagaaagtggtcgagggcggtaagcaaagcgagctggaaagcatgtgccgcgactggccgttcttctcgacccgcctcggaatgctggagatggtctactcgaaagccgacctgtggctggcggagtactacgatcagcggctggtgaaaccggaactgtggaaactcggcgaagagctgcgtcagctgttaaccgccgatatcaaagtggtgctggctatcgctaatgactcccacctgatggccgacctgccgtggatcgccgaatccatccagttgcgtaacatctataccgacccgctgaacgtcctgcaggccgaactgctgcaccgttcgcgccaggctgaagaggctggcgaggaacctgatgcgcgcgttgagcaagcgctgatggtcaccattgccggcgtcgcggcagggatgcgtaataccggctagtcaccgttttccccggccgcccggccggggattttccctctcattttagtgatgcaacatctcatcgacgatctgctctttatgcagcgcatagggataataggtcggccagttatccatctctttcagcaaggcctcctgtgattcattgcccataaatatatggaaatgctgcgatttgcgcgggccaataatatggtcgctgaactgaacgaatttcggcgcgttaccatcgccctgttggcattcaaacagatagcgaacgcccttcttgccggaggtatattgcaggattttgtagcctgagtaggtatatttgcagctattaacggtcttgccgacgtggaactctatcacgtcatcttcgatgccaatctgctccacgtcggtggcgtaacccttcttataataggcgcgatactcttccacactcttgccgccgggctttttcgccttctgctccagaaccggatcaaggtcgccattcagcaggtacgggttaacagactgccagacgccatcccaatcgctcaacgcgcgatccttcacatctttgtcggcaaaaacgccttcgctggcctggcgttctatgtcggtcaacgctgggccatggctatggttaccgtgggcgaacgcctggacgctcgcaagcgccatgcctaagccaaacgcgagcatggggatctttcgggtcattactctctcctgagttcaatatcaattgcgataaaatgttacgatataacatatctatggcaggaggcaataacgacgatctcgcgcttttaccgctggaaaaatgtccggtatgatgaaagacatgacgttttggcggggtaacgatggactacagcatcaatcaactcattgatacattgataaaaaagccgaatagcattgcggaggtgcattttgccggcgcgatacgcccgcctgctgaagctgtaataatgcgcgattttccccgcctgaatatcgtcattgaggggctgttgcgcgatctcgccttgggcgaaaccgccgcgccgctgcagttacgcgatgtactgtatattgcgggcgatagctggaactggccgcaatggcagaccccttgcctgctattgagcattttttttggcaaacagctgttggaattttcgctgcagcgctggagcggcgaggcgctaactcttgtccagaagatccaggtaccgcgccgcgggccgcgcgtgggttcattcctgctacaggcgctaaatgaaatacgtatgcagccgcaggaacaacaaaccgcccgcagcatcgtgattagcctactcagccactgtaccgatctgctgggtagtcaggcgcaaacttcatcgcgcagccaggcgctgttcgaagcgatccgccagtatatcgatctccatttcgctgagccgctgagccgggaatccgtggcccagtcgttttacctatcccccaattatctctcgcacctgtttcagaaatgcgggcccatgggttttaacgaataccttaatcatattcgcctcgaacaggcgcgcatgctgttgaaaggccatgatatgaaagtgaaagacgttgcccacgcctgcggcttcgccgacagcaactacttctgccgcctgtttcgtaagaacaccgaacgctctccctccgaataccgccgccagtatcacagccagttgacggaaaaatcccctgtaccgtaaaactagatttttgtaagtaactgcctgctgattgctggccacgtacgtttataagcaggaacagacggacaaatgtgatctaaatcatccttaatcgcaatgcgtacatttatccagtttttggcaaatttgtcatctggcgagcaggcaaacgaaagccgtatcctttcttcaacatcactgaattacacatcgaggaatggttatggaactctatctggacacggcgaacgtcgctgaagttgaacgtctggcccgcatttatccgctagcaggcgtcaccaccaacccgagcatcatcgccgccggcaaaaccccggtttgggacgtgctgccgcgcctgcaaaaagccgtcggcccggaaggtgttctgttcgcgcagaccatgagtcgcgatgcgcagggcatggtggaagaagccaaacgcttgagcaacgccgtgccgggcatcgtggttaaaattccggttaccgccgaaggtctcgccgccatcaaactgctgaaaaaagaaggcatcccgacgcttggcaccgcggtctatagcgcttcccaggggctgctggcggcgctggccggcgcgaaatacgtcgcgccatacgtcaaccgcgtcgacgcccagggtggtgacggcattcgcatggtgcaagaactgcaatccctgctggaaatgcacgccccggaaagcaaagtcctggccgcgagcttcaaaaccccgcgccaggcgttggattgcctgttggctggctgcgaagctatcaccctccccttagacgtagcgcaacaaatgctcggcacccccgcggtagagtcagccatagagaagttcgagcaggactggaataacgcatttggcacgttaaacctgtaatccgatcgtctgccgccggtcggcggcttgcacggtcatcgaggaggaatcgaaatggatcgcattattcaatcacccggtaaatacattcagggcgctggcgccatcaagcgtctcggcgactatctcaaaccgctggccgaacggtggcttatcatcggcgataagtttgttcttggctttgccgaagagcagctgcgtaccagccttggcggcgctggtctggtggccgaaatcgcaccgttcggcggtgaatgttcgcaaaatgaaatcaaccgcctgcgcgatatcgccagcagcgcccgatgccatgcagtgctcggcatcggtggcggcaagacgctggataccgcgaaagcgctggctcactatatgcatctgccggtggtagtagccccgaccatcgcctccaccgatgcgccgtgcagcgcgttgtctgttatctataccgacgatggcgaattcgaaagctatttgatgctaccgcacaacccgaacatggtggttgtcgatacgcagatcgtcgcggccgcgccagctcgcctgctggcagccgggattggcgatgcgctggcgacctggtttgaagcccgcgcctgctcgcgcagcggcgcgaccacaatggcgggcggtaaatgcactcaggcagcgctggcgctggcggaactctgctacaacacgctggttgaagaaggcgaaaaggcgatgcttgccgccgagcagcatgtggttaccccagcgctcgaacgggtgatcgaagccaacacctacctgagcggcgtcggctttgagagcggcgggctggcggcggcgcacgcgattcacaacggtttgaccgccatcccggacgcccatcacttctatcacggcgagaaggtcgcgtttggtaccctgacgcagctggtgctggaaaacgcgccggtggaagagatagaaaccgcggcggcgttgtgtcacagcgtcggcctgcccatcacgctggcgcagctcgatattaaaggcgacatcccggccaaaatgcgcacggtcgcggaggccgcctgcgccgaaggcgaaaccatccacaacatgccgggcggcgcctgcgccgaccaggtttacgccgcgctactggttgccgaccaatacggtcagcgtttcctgcaagagtgggaataacctgccccaaatgcccggcatttgccgggcataacgcttaacgagtaataccttgcctggtaatctgaggttgacgttttttaaggctgattatcgccagcgccgcgacgatcagcactataccagcgccttccaccagccccggattttcacccagcagccaccaggaaaacagcacgccgcaaaccggtaccgccagcgtgctcaggccggcgacgctggcgggcaggttacgcagaacatacagccacaggctccaggccaccgccgtcgccaggattgcgctataagccagtgcccaaaaaaccccaggttgccagtcaatgctgcgctgcggcaccagccacgccaccacgctcattaccagcgcggcatatagcatctgccaggcggttaacgacagtaaatcgagatgcggatagcggcgatacatgcgtttggcgacaatcgcgctcgctccccaactgatgccggaaaggatcgccagcagcgcgcttttcatcgaggaaaaatccaactgccacggctgcaataccagcagtaggccacacgccgccagtacgatagcggcatactgcagccgccgcatgcgctcgcctaaaaacagcgccgccatgatcaccacccagaacggcatggtgtagctgagaatggcgactttacctgcgccgccgctcatcagcgcccactgcgccaggccgaccatgccgcaggtttgcagcagcgcaatcgccagggtgtaaccaaacggcgtcggccgcatgccgcgcccgcgcagcgccaacaccgccatcagcacaatcgcgccgaagatacaacgcagtgcggtaaaatcgaaagcgccgatatagagcgttacctgtttcatcgcaatccagctgtagctccagataagcgtcagcaggacgagaccgcaaccggccaggagattgctgttccttgcaaccgtcataacttctccaccatcattatttttgcgggcactatactcgctttggcggcaggttgcttaaaggcagagcgcacttttcgtgctaaaaaagagggcggcgaattgcagttcgccgccccggtaaggatgaaacaagaggtaaagcaggtgattacgccggacgcacgcccagggtatggcaaatggcatagctcatttcggcgcgattcagggtataaaagtggaaatctttcactccttcgcggcttaaaattttcaccatgtccatggcgatattcgcccctaccagttggcgcgtttcggcatcgttatccaacccttcgaacattttcgacatccaggtcggaatacgcacgttcgtcatatcggcaaatttcttcgcctgtttaaagttggagaccggcagaattcccggaataatttccacgtcgataccggcggagacgcagcggtcacggaaacgcaggtagctttcgacatcaaaaaagaactgagtgatcgcgcgattagcgccggcttccactttgcgtttcaggtttaacaggtcggcctgcgcgcttttagcttccggatggacttccggataggcggcgacggagatatcaaaatcaccaacgtcttttagcagcgtcaccaggtcggcggcgtacatctccggcttaccgctgcccggcggcaggtcgccgcgtagcgcgacgatatggcggataccgttattccagtaatcctgggcaatcgcgcgcagttcatcgcggctggcgtcgatacaggtcaggtgcggcgccgcttccagaccggtacggtctttaatgcctttaataatgctatgtgtgcggtcgcgctcgccagagtttgccccgtaggtgacggaaacaaacttcggcttcaggctgcttaagcgatcgatggatttccacagggtttgctccatttcactggtacgcggcggaaagaattcaaaggatacattaatctggccctggacttccgccaggctctgattcagggcttcccgctgattggcgtgaaaaaagctcataccttacctcatcaatcgcattatatttatcagtcgtgttgcgaacttctatacgtttagacgtccagatgtaaaaatgacggaaaagcgggcgggcgtcaatagaaaaatctgcgtaaacagtgaggaattttcagtcaaagtgaaaaaagttcatctggcgtcaggccaggcgcgttaattatccgcaagatcaaagaccccacgctgccgacgcagcatatcaccctcgccgggcagctggtggcgcgggaatgagcataatgaaggccggccctacgggccggcctgagaggagagattacagcaactgcgccagacgattaatatctgactgaatagccccggcagtgacatcgcgacccgcgcctggcccacggatcaccattgggttatcgcgataccagcgactctcgatagcgaagacgttatcgcatggcagcagcgccgccagcggatgttcctgacgcaccgcttctaccccgacgcgcgctttaccgttggcatcaaaacgcgccacgtaacgcaacaccagccccatttcacgggcggcttcaaggcgctgcagcatctgttcgttcagctcttcgccattctcaaagaagtggtcaaccgagccctcttcgcaatgcgccggaaccaacgattccacgcgcacctgatccggttcgatattgtaaccggcttcgcgcgccaggatcaccagcttgcgcatcacgtctttacctgacaggtcaacgcgcgggtccggttcggtcagcccttgctgccaggcctgatccaccagttcggtgaatggcaccgtgccgtcaaactgcaaaaacagccaggagagcgtaccggagaagataccgctcagccccaggatggtatcgccgctgtcgatgagatcgcgcaccgtatggttaaccggcaagcctgcgccgacggtggcgttatataaccagtgacggccggtcttttcgaaggcgtcgtggatctggcgatatttatcgctgctgctggcgcccgccagcttgttggcgctgatcacgtggaaaccgtggctggcgaaatccagatactgatcggccagctgttcgctggcggtcacgtccagcaccactaaatcatcataagggtgcgcgcgcatccacaggaatagcgactcttcatcctgctcaaccgcttcatcttcaaagaatgccaatgcacgactggcatccagaccttcatagttcagcaggctacggcggctatccaccaccccggccaacaggaactcaaagccggtacgagcggaaagcgtgctctgctcgcgtgcgaacaactccagccagcgggagccgatattgcctttgccgaacagcaccagaccgatgcgtttctccgcgcggaacacggaatgatgcagcccctgaatcaggctctcggttgggccggcgcgcagcaccgccaccaggctgatgccctcttccgattgccaggtaaactctaccggctgccctttcaactgctgccagaaacggtggcagtgcaatggattgcgggtcacccccgcgccgaccatcgccaccagcgccagcttctggcgcagacgcagctcacccggcaggcccgcctcgtccagcagcttcagcgcgctgttggccacttcagaggtgtaacagaactgcagaagcttacggtcggcatgcacgcccaccgccagcgggcgcagctgcgcgcgtttaaaaatctgatccagctctttatgcgccagtttgaaatcctgaccagccggcacctggaattcaatcaggcagacgtcgtcatgactggtgacgatacgcgcgccagtgccggatgccagcacgcgctcaatgcgcgtcgaaccctggtccggggtatagctgcagcgcagctgtaaatcgatatcgctgccggaaaccggctgtagcgtacgcgcgtgcagcaccggcgccgccagtcgagccagctcgctggcctcatcaaggcgcagcagcggcagcaggcacgcatctttcactttacgcgggtcggcgctatagaccccggccacatcgctccagatggtgacgcgggagaccccggccagcgcgccaatttgggtggcggagtagtcggaaccgttacggccaagcagtacggtttccccggcattgttacgggcgataaagccggtaaccaccagccgtttgttggggtgctgcgccatcaactgttgtaacaacgggtaggacaagccttcatcaacctgcggctgcgcggcacgttccgcgcgcaggaaagcgcgcgcatcaagccaggcggcttcaacgccaaggtggttcagtaccgccgccatcaggcgcgcggaccacacttcgccatggccgacaacttcggcatataccgcatcggtgacgccgctatccagcaggcccgccagacgttcaagatcgtgaataaacgtcgcgatcagcgagtcggcggcgtccgccggcaacaggccggcgatcaggtccatttgatagcgacgcagcgcttgttgcacctgatgcgcagaaagacgatcggtctggcttagctgcagccagctaatcagctggttggtggtgctaccggcggcggagacgaccatcatatcgcctgcctgcgcgtagtcggtcatgatcccggcgacgcgcaggtaacatttcgcatccgctaaactactcccaccaaatttgtgcagctgacgacccttcgcccctgcctgcgcaatcacactcatctttattcctcgtttgctgcccggaagccattttccaggtcggcaattaaatcttcaccatcttcaataccggtcgaaatacgcaggagcgtttccgagatccctgccgccgcacgcgcttccggcgccatgcccgcatgcgtcatcgtcgccgcatgggaaatcaggctctcaacgcccccaacgattccgccagcgtaaatagcgataaaccgctcaagaagcgacgcagcgtctgctcatcgccatcgagctcaaagcttagcatcgccccaaaacctttttgctgacgcgccgcaatctcatgcccctgattctccggcagggacggatgatacagctttttcaccagcggctgggttttcagatagtcgactatcgcctgcgcgttgcgctgcgccacttccattcgcggagaaagggtacgcaaaccacgcaataacagatagctatcaaacgccccgccggtgacgccgatattattcgcccaccatgccagttcggtgacagtttcaggatctttggcaatcaccaccccggcgaccacgtcagagtggccgttgagatatttggtacacgaatgcaacaccagatcggcgcccagcgccagcggattttgcaacgccgggctcaggaaggtgttatccaccacgctcaccgcgccggcttcacgcgccagcccacagattttcgcaatatcgaccacccgcagcaatgggttgctcgggctttcgaccagcaccagcttcggttgttccgctagcgcttcacgtaatgcctgttcatcgctttgatcgacaaagcgcacgcgatagcagccgcgtttcgccaggctgtcaaacagacgatagctaccgccataacagtcgtgcggcgccaccagcagatcgcccggtttcaggaacaccgtggtcaccagcaggatagcggacattccggtattggtcagtaccgcgcccgcgccgccttccagttccgccagcgcgcgctgtacgacatcgcgagtcgggttgccgcgacgggaataatcgtgagcgcgaggttcattgaaaccggtgaaattataggtgctggagaggtggatcggcgggacaacgcaaccgtactgttcgtcgtcatttaaaccgctacgcactgcaatggtggcctgtttacgcgtcatgttggacagttcctgggctgttcggtgagaagtcaggcctcagagtaatcattgtcacaatagacgtcaatacatctggacatctaaacttctttgcgtatagattgagcaaaagacaaatagccgttaaaattatatgcattagcgcacgtcggcggcggcttatatcatgtcggaaagcgcgctcatacggtaaactacgcgcaattatggccaggcgtaatgttctggcccttaactaataaacagaggattaaggtatctcatggctgaatggagcggcgaatatatcagcccatacgctgagcacggtaagaagagtgagcaagtaaaaaaaattacggtttccattcctctgaaggtgttaaagatcctcaccgatgaacgcacgcgtcgtcaggtgaacaacctgcgtcacgccacgaatagcgaactgctgtgcgaggcgttcctgcatgcctttaccggtcaaccgttgcctaacgatgaagacctgcgtaaagagcgcagcgatgaaatcccggaagcggcgaaagagattatgcgtgaactgggtatcgacccggatacgtgggaatactaagacataaaaaaagcggaagacatcttccgctttttttatccctcggtgttgccagacgaaggatacaaaaaagccgccctgaggcggctctttctggcaacttacttgctgcccgggatgctgaagcgcttgttgaagcggtcaacacggccaccggtagcaacatcacgctgtttgccggtgtagaacgggtggcatttaccgcacacgtcgaggttcaggtcgtgaccaacggtggaacggattttcatgacattaccgcaagaacaggtagcagtaatttcgtcgtaatttgggtgaataccttttttcatgggagaacctcagttaaggccgcgtcgctcttccagccctaacgccagacaccacgcgatattaataatttcccgacgaccttcgcgcagctggcgtaaaccggcttagcgaatttcccgggttttgggagtttgatgcggcataaagcgcaccaaaggcggcgaatcatacagaatttgaccagcagatgcaaacttatccgcgtcgcctttggtaatgtgtatactaacccgccagatttcaagtcaggaagattccatgtccgtcgctcatgtcgccctgcccgttccgctgccccgcacctttgactatttgttgcctgaaggcattccggtcaaagcgggctgtcgcgtacgcgtgccgttcggcaaacaggaacggatcggtatcgtggtgtcggtcagcgagcgtagcgaactcccgctcgcagaactcaaaccggtcgccgaagcgctggatagcgaaccggtattttcctctaccgtctggcggatgctgctatgggccgcggattactatcatcatcccatcggcgacgtgctgttccacgcgctgccgattatgctgcgccagggcaaaccggccagcgccgcgccaatgtggtactggtttgcgacggaacagggacaagcgctggatatcaatactcttaaacgctcgccgaagcagcagcaggctctggcggcgctgcgccagggcaaaatctggcgctatcaggtcgcagaacttgcattcaatgacgcggcgctacaggcgctgcgtggcaaagggctggcagagctggcctgcgaagcgccggctattatcgactggcgaagccagttctcggtgcccggcgaacggttacgcttgaataccgagcaggcgaccgccgtcggggcaattcatagcgcttcagaccgtttttccgcctggctgctggcgggtattaccggctcagggaaaacggaagtctacctgagcgtactggagaacgtgctggcgcagggtcggcaggcgctggtaatggtgccggaaatcggcctgacgccgcagactatcgcccgcttccgccagcgttttaacgccccggtggaggtcctgcattcgggtctcaacgacagcgagcgcctcgcatcatggttaaaggcgaaaaatggcgaagcggcgatcgttatcggcacccgctcgtcgctgtttacgccgtttaaagacctcggcgttattgtcatcgacgaagaacacgatagctcctataaacagcaggaaggctggcgttatcacgcccgcgacctggcggtatggcgcgcccatagcgaacagatcccgattatcctcggctcggcgaccccggcgctggagacgctctataacgtgcgccagcgcaagtaccgggagttaaagctgaccaaacgcgcgggcaacgcccgtccggcacagcagcacgtgctcgatttaaaaggccagcagttgcaggcggggctttcgcctgcgctgattaaccgcatgcgccagcatctgcaggccgacaatcaggtgatcctgtttttgaaccgccgcggtttcgccccggcgctgctgtgccacgactgcggctggatagcggagtgcccgcgctgcgatagttactacaccctgcatcaggcgcagcatcatctgcgttgccaccactgcgacagccagcgccccattccgcgccaatgtccttcctgcgggtcgacgcacctggtgccagtgggtctcgggaccgaacagctggagcaggcactggcgccgatgttccctgatgtaccaatctcacgtatcgaccgcgataccaccagccgtaaaggagcgctggagcaatatcttgccgacgtccatcgcggcggcgcgcgcattctgattggcacccaaatgctggctaagggacatcatttcccggacgtcaccctggtgtcgctgttggatgtcgacggcgcgctgttttccgccgatttccgctcggcggagcgttttgcccagctctatacccaggtctccggccgcgccgggcgcgcgggcaagcagggtgaagtgatcctgcaaacccatcatccggaacacccgctactgcagaccctgctgtataaaggctacgatgcgtttgccgagcaggcgctggcggagcggcaaactatgcagctaccgccgtggaccagtcacgtgctgatccgcgccgaagaccataataaccagcaggcgccgctgtttttacagcagttacgtaacctgctgcaggccagcccgctggccgatgataaactgtgggtactcggcccggttcccgcgctggcgccaaagcgcggcggtcgctggcgctggcaaattctgctgcagcacccttcccgcatacgtctacagcatatcgtcagcggtacgctggcgttgataaataccctgccggaagcgcgtaaagtgaagtgggtactggatgtcgatcctatcgaaggctaacgcttctcttgcgaggcggatcgaaaaattcaacaaccgtcacgtttttcatgaaaattctgtaactctcaggctgtactatctgttaaaaatgttgctgatgtcagcacgcaagggatgtgtctgcgcagtcagcgaggagaaaccaggtgaagcccaaaaaacaaatggttgccgccaccatgaaagacgtcgccctgaaggcaaacgtttcaacggcaaccgtatcccgtgcgctaatgaatcccgacaaagtgtcgcaggcaacccgcagtcgggtggagcaggcggcgcaggaagtcggctatttaccgcagtcgctcgggcgtaacatgaaacgcaatgagtcgcggacgatccttgtgatcgtgccggatatttgcgatcccttcttcagtgaggtgattcgcggcattgaagtgaccgccgccgacgaaggctatctggtgctgatcggcgattgcgcccatcagaatcagaaagaaaaaacctttattgacctcattatcaccaaacaaattgacggtatggtgctgctgagctcgcgcctgccgttcgacgccagtgtcgaagagcagcgtaatttgccgccgatggtcatgtcgaacgagttcgcgccggagctggagctccctacggtgcatatcgataacctgaccgccgcgtttaatgccgtcaattatctccatgaactggggcatcaacgtatcggctgtatcgccgggccggaggatatgccgctgtgccattaccggcttcagggatacgttcaggcgctgcgccgcagcggtatcaccgtcgatccgcactacatcgcccgcggcaactttacctttgaagccggcgccaacgcgctggagcaactgctggcgcagccggtgccgccgaccgcggtcttttgccatagcgacgttatggcgctgggcgcgttgtcgctggccaaacgtcgcggcctgagggtgccggaagatttatcgattgttggatttgataacatcgcgttgtctgaattttgcgatccgccgttaaccactgtttcacagccgcgttttgatatcggccgtgaaggaatgctgctattactcgagcaaatgcagggccgtaacgtcaatagcggctcgcgtctgctcgattgcgaactgatcgttcgcggcagtacgcaaaaaatcagacgataaccatcaggctttcgggcctgctcttctggtcaaaggcccgccgcttaagtaacatggcgggctgacgaacgaatataagacagcgaaacgatagtggcacaacgagattatgtacgccgcagccaaccggctccttcgcggcgcaaaaagagcagctcccgaagctcaaggaacaagcaaagcagccttccggcgatttcaccaactatggttgcgatcgcagcggccgttctggtggcctttatcggtggactgtatttcattacccatcacaagaaagaagaagcggaagcgctgcagaaccgtcaggtggcaggcaatggtctcccgccaaaaccggaagagcgctggcgctatattaaagagctggaaagccgccagccaggcgttcgcgcgccgactgagccaaccgccggcggcgaagtgatgaaacccgagcagcttaccgacgagcagcgccagttactggcgcaaatgcaggcggatatgcgtcagcagcccacgcagctgaccgaagtaccgtggaacgaacaaacgccggcgcagcgtcagcagacgctgcagcgtcaacgtctggcgcagcaacagcagcaggcgcagcagcaacagtgggcgcagactcagcagcagaccgcgcagcaacagccgcgcgtccagcagccgaagccggtgcagcaacagcaaccgaagcaaaccgcgtccaaccagcagccgtaccaggatctgctgcagacgccggcgcataacaccaccgcgcagccgaaaacccaggccgccgcgccggtcgcccgcgtggcagaagcgccgaaagcagcggccgagaagaaagacgatcgcagctggatggtacagtgtggttcctttaaaggcgccgagcaggccgaaaccgtgcgcgctcagttggcctttgagggctttgcttcacatatcaccaccaacaacggctggaaccgggtggtgattgggccgctgaaaggcaaagagaacgccaacgatatgatcaaccgtctcaagatggccggacacgcaaactgcattcgtctcgccgccaggggttgaaaccccaaaaatccccccatctataattgcattctgccccgcgtaacccgcgggcccctattccgcttttgcaaccaaggggtctgctcgtgacaacaatagttagtgttcgccgtaatggccatgtcgttatcgccggtgatggccaggccacgctgggcaacaccgtgatgaaaggcaacgtgaagaaagtgcgtcgtctgtacaatgacaaagtgatcgctggtttcgctggcggcaccgctgacgccttcaccctgttcgaactgttcgagcgtaagctggagatgcatcagggccatctggtgaaagccgccgttgagctggccaaagactggcgtaccgaccgcatgctgcgcaaactggaagcgctgctcgccgtcgctgacgaaaacgcgtcacttattatcaccggtaacggcgacgtggttcagccagaaaacgatttgattgcgattggctccggcgggccatatgcccaggccgccgctcgcgcgctgctggaaaacaccgaaatgggcgctcgcgacatcgccgagaaagcgttggatattgcaggggatatctgcatctataccaaccacttccacaccatcgaagaattaccttctaaagcgtaaggatctcccatgtctgaaatgaccccacgcgaaattgtcagcgaactggacaaacatattatcggccaggacgcggccaagcgttctgttgctatcgccctgcgtaaccgctggcgccgtatgcagcttaatgaagagctgcgtcatgaagtcacgccgaaaaacattctgatgattggcccgaccggcgtcggtaaaaccgaaatcgcccgtcgcctggcgaaactggccaacgcgccgttcatcaaagttgaagcgaccaagttcaccgaagtgggctatgttggtaaagaagtggactctatcatccgcgatctgaccgacgccgcgatcaaaatggtgcgcatgcagtccatcgataaaaaccgttatcgcgccgaagaaatggccgaagagcgtatcctcgacgtgctgatcccgccggcgaaaaacaactggggccaggctgaacagccgcaggaaccttccgctgcgcgccaggcattccgcaagaaactgcgcgaaggccagcttgacgacaaagaaatcgaaatcgacctcgccgcggcgccaatgggcgttgaaatcatgtcccctccgggcatggaagagatgaccagccagctgcagtccatgttccagaacctgggcggccagaaacagaaaccgcgtaagctgaaaatcaaagacgcgatgaagctgcttatcgaagaagaagcggcgaagctggttaacccggaagagctgaagcaagaggctatcgacgccgttgaacagcacggtatcgtgttcatcgacgagatcgacaaaatctgtaagcgcggcggcaacgcctccggcccggatgtgtctcgtgaaggcgttcagcgcgacctgctgccgctggttgaaggctgcaccgtctccactaaacacgggatggtgaaaaccgatcacattctgtttatcgcctccggcgcgttccaggtcgccagcccatccgatctgatcccggaactgcagggccgtctgccgatccgcgttgagctgaaagcgctgaccacccatgatttcgaacgtattctgaccgagccgaatgcctccatcaccgtacagtacaaagcgctgatggcgaccgaaggcgtgaatatcgaattcactgaagatggtatcaagcgtatcgctcaggcggcatggcaggttaacgaaactaccgaaaatatcggcgcgcgtcgcctgcacacggtgctggaacgtctgatcgaagacatctcttatgatgccagcgaaatgaacggccagacggtgaccatcgacggcgattatgtcggtaaacacctggatgttctggtggcagatgaagatctgagccgttttatcctataatccggttcaatgcattttcatcacacacgatggggctatgatagccccatttttttggctgaaagaaatgactgaacaaccgataacacgcacccgggcctggcttgaaagcctgcgtccaaaaacattacctctggctttctccgctatcatcgtcggcaccgcgttggcgtggcagcaaggccacttcgatccgctggttgcgctgctggcgctcattaccgccggtttgctgcaaattttatctaatctcgccaatgattatggcgacgccgtcaaaggcagcgataaacctgaccgtatcgggccgctgcgcggaatgcaaaaaggcgccataacccagtcgcagatgaaacgcgcgctgatcgtaacggtagcgctgatttgcctgtctggcctggcgttgctgttctccgcctggcagacaatggcggacttcatcggctttatggtactcggcggcttgtcgattatcgccgctatcacctataccgtcggcacgcgtccttacggctatattggccttggcgatatctcggtgctggttttcttcggctggctgagcgtcgtcggcagttggtatctgcaggcgcatagcatcgatgcggttattttcctgccggctaccgcctgtggcctgctggccgccgcggttctgaatatcaataacctgcgcgatatcgatagcgaccgcctgaacggtaaaaacacgctggcggttcgtctggggccggtgaacgctcgccgttatcacagcgtcctgctgcttggcgctccgctgtgcctggcgctgtttaacctgctggcgctgcacagtctatgggctggctgtttattctcgccattccgctgctggtaaaacaggcgcgttttgtcatgcgtgaacgtgaaccggtggcgatgcgtccgatgctggaacgcacggtcaaagcggcattattaaccaacctgctgtttgtcatcgggattatcggcagtaagctggcggcataactgacaaatatcaattaacaattgatgattttgcaaacaatgcagttcacgggatatactaaaaattctcgcagcaactgaacgttaagcctatgaaatacgatacttccgagctttgcgacatctaccaggaagatgtcaatgtcgtggaaccgctgttttccaactttggagggcggtcgtcgtttggtggacagatcattacggtaaaatgtttcgaggataacgggttgctctacgatctgctcgagcagaatggccgtggtcatattctccttatcgacggcggcggttccgtgcgacgcgcgttaattgacgccgacctggcgcgtctggcggtacagaacgaatgggaagggctggtggtctatggcgcggtgcgccaggttgacgacctggaagatttagatatcggtatccaggcgttagccgccattcctgtggccgctgcagggaaggtatcggcgaaagcgacgtgcgcgtcaatttcggcggcgttaccttcttctccggcgatcatctgtatgccgacaataccggtatcatcctttccgaggatgcgctggatatcgaataacgctccggctacgcctaataaaaaaggccttctcactgagaaggcctttttgttatgccgcgaaacttagtacagtttcttcgcgcaatccatccagtcagacttgaacggacgcttcatattttcgatagcatcgatgatgtcgtggtgaaccagcttctcgttctggataccaacacagcggccgccaaagccctgcagcagcagttcaatagcatatgcgcccatacgggaagccagaatacggtcgtaaggaaccggagagccgccgcgctgaatgtgacccagcacggtcgcacgggtttcacggcccgtttctttctcaatgaagctagccagttcgtcaacgtcgcacatgtgctcggtgatggccacgatcgcgtgtttcttacctttcgcgatgccggctttgatttcagccaccagatcgtcgcgggtatattctacttccggcaccatgatgaactcacagccgccggcaatcgccgccgccagagtcagatcgccacagtagcggcccatcacttccaccacagagatacgctggtgcgaagaggaggtgtcacgcaggcggtcaatcgcttcaacaacggtgctcagcgcggtaaagaaaccgatggtgtagtcagtacctttgatgtcgttatcgatggtgcccggcaggccgatgcaagggaaacccatctcggtcagacgcatcgcacccatataggaaccgtcgccgccgataacaaccagcgcgtccaggccgcgctttttcatattttcaatggcgacagcgcgaatatgctcttcgcggaattccgggaaacgagcggagccgaggaaggtaccgccacggttgatcatgtcggacacgctgtaacggtcaagctgaaccatacgatcttcatacaggccgaggtaaccgtcatagattccaaaaacttccagaccttccgttaatgccgcgcgcacaacgccgcgaattgctgcgttcatgcccggcgcatcaccgccacttgtcaacacaccgattttcttaatcatgactacctctgaacttaggaagcaaaaaataatcctgttgcctgaagcgctcccataccaggagtgcacgacgataattgcaatagtatatcaaacgcttctggctgaattgattcaggtcagaccaaatggcggtaatttatacaaaaaatgcctacccgccccacatttttacatcgagtttacagactataaccgaaagctcaaaaaacgccctgccgcgccggcggcaccacagaacagggatcctgatgaatgatgacatccgatcccgggaaacggcgcaaaatagcctgctccacctggtcggcgatcacgtgcgcctgtaccagcgggaggttatcttccatttccaaatgtatttgaataaagcgagtcggccctgactgccgcgttcgtagatcgtgcgcgccgctgacgccgggccagctgttcacgatactgatgatttcctgacgttcctcatccggaagcgcgcggtctaataacgattgcaccgcgtcgtaacccatacgcagcgcgctatataaaatatagatgccaatccctaatgcaaacagcgcatcggcgcggtgccagccgtaccaggagaggccgagggcgataagaatagcgccgttcatcataacatcagactgataatgaagcatatccgcgcgcacggcctggctctgggtttttctgaccacccagcgctgaaaggttaccagcatcagggtgcttatcaaggcgatcagcgtcaccaccatcccgacgcctgccgcctgcatcggttcaggacggatcagatgctggatcccggtcaggaacagaaacaacgccgaaccggaaataaacatgctctgcgccagcgccgccagcgattccgcttttccatggccaaaagtatgttcttcatctgcaggttgtagcgagtaacgcaccaccagcaggttggtcagcgaggcggcaatatccaccagcgaatccaccagcgccgccagaatactcaccgaaccggtataccaccacgcaaaaattttgatcaaaagtaacacggaggccatcgccgtcgcggcaatagccgcgcgactcaccagccgcccataagattgattcataaacgctccttttccggcgatgcgcttagtataacctgaacttttacccggaagatgaacgggcatgcggcggctgaggcgaaaaaaagacaaaaaaacccccacatcatgtgggggaagacagggatggtgtctatggcaaggaaaacagggtttgttacttgggttgcacggtactgctactactggaaagcatcatggctgagcctttttgcatccttgcaacctcacgcaactgatccatacgctgctggtgcttagcatttaaaaccgcttgctgctcaggggttagcaggtggtacatctggttgcggactttcgccatttctacctggcgggcaacctgttcctgcgccatcttttctgcctgagcgcgcacagcgctttcatcaaatttatctgcggtgacaaggctatgcattgtctccagttcgctaacattaacagggagccggtcatggcgcgcccgttgcataagatcccgtaactgctgtcgttgctgttcggttagacttatgccgtcaaacatatggctctggccgctgcgctgggctccctcttcaccgtggagccagttaacgccggtaacgacttcagcggcttggctagtagcacttagcgccagcgttgaggccatgacggcagcgataacattgcgcatcacatactcccaaaacgtttgtgtcgcgattcaacgagagacagtttacgattcaggctgcaaacatgcgtcagggggtgtaaaacaacgtaaagtcatggattagcgagccttgatgacgtaatttctgcctcggaggtatttaaacaatgaataaaatcctgttagttgatgatgaccgggagctcacctccctgttaaaagagctgctcgatatggaaggttttaatgtgctcgttgcccatgacggtgaacaggcgctggcgcttcttgacgacagcattgatctccttttgcttgatgtgatgatgccgaagaaaaacggtatcgacacgcttaaagaattacgtcagacacaccagaccccggttatcatgctaacggcgcgcggaagcgagctggatcgcgttctcggcctcgaactcggggcggatgactatttgcctaagccgtttaacgatcgcgagctggtggcccgtatacgcgcgattctgcgtcgctcccactggagcgagcagcagcagacgaccgaatccggctctccgaccctggaagtggatgcgttaagcctcaacccgggccgtcaggaagccaattttgatgggcaaacgctggaactgaccggcaccgagttcaccctgttatatctgctggcgcagcatcttggtcaggtggtgtcacgtgaacacttaagccaggaagtgctgggcaagcggctgacgccgttcgaccgcgctatcgatatgcatatttccaacctgcggcgtaagctgccggagcgcaaagacggccatccgtggtttaaaacattgcgcggacgcgggtatctgatggtttctgcttcatgattggaagtttaaccgcacgcatcttcgctatcttctggctcacgctggcgctggtgttgatgctggtactaatgttgcccaagctggactcgcgccagatgaccgagctgctggaaagcgagcaacgtcagggcatcatgattgagcaacacgtcgaggccgaactggcgaccgacccgccgaacgacctgatgtggtggcgacgcctgtttcgcgccatcgataagtgggcgccgccggggcagcgactgctgctggtcaccagcgaaggccgcgtgatcggcgcagaacgcaacgaaatgcagatcattcgtaactttatcggccaggccgataacgccgatcatccgcagaagaagcgttacggacgcctggagatggtcggcccgttttccgtcagggatggtgaagataattatcaactttatctcatccgccctgccagtacttcacaatccgacttcatcaacctgctatttgaccgtccgctattactgcttatcgtgacgatgctggtcagcgccccgctgctgctctggctggcgtggagtctggcgaaaccggcgcgcaagttgaaaaacgccgccgacgaagttgcccagggtaacctgcggcagcatcctgaactggaagccggtccgcaggagtttctggccgccggggccagcttcaaccagatggtgaccgcgcttgagcgaatgatgaccagccagcagcggctgctgtcggatatctcgcacgagttacgcacgccgttaacccgtctgcagttaggcaccgcgttgctgcgccgccgcagcggtgaaagcaaagagctggagcgtatcgaaaccgaagcgcatcggctggacagcatgatcaacgacctgctggtgatgtcgcgtaatcaggcgaaaaacgcgctggtcagcgagacggtgaaagcgaatcagctgtggggcgaagtgctggacaacgcggcgtttgaagccgagcagatggggaaatccttcaccgttgagtatccgccgggcccctggccgctgtacggtaaccccaatgcgctggaaagcgcgctggaaaatatcgtgcgcaacgcgctgcgctactcgcacacgaaaatttcggtcagcttctcggtggataaagacggggttacggtcaacgtcgatgatgacggcccgggcgtcagcccggaggatcgcgagcagattttccgtccgttctatcgtaccgacgaggcccgcgatcgcgagtccggcggcaccggtctgggtctggcgattgtcgaaacggcgattcagcaacatcgcggctgggttaaagctgacgatagcccgctgggtgggctgcgtttaacaatctggctgccgctgtataagcgtacttaaccctgtcccggcttgcgctacgctgagccgggctactggttgcaacgttcaatatgggggaattatttcccccataatctgcgcgaattatcctcgatctgcccacttaaacgccgtttctgcatggttctgctccagctcaccgacaggcccgccgccgataacagacggtgatactggtcgtcgtcaaacggcatatgccaggcaatcgcaccagcctcatgcacgctcacgtcgctcagacgcgataccagccccagcggcgcatcgctggaaacccggccgccggcgataatgcggtagagccagccaaccttgccgctgttttgcatcagttgcgccatgtcgctaataccgaaatggtaattcagtttgaagcagggagagcgcggttgtgtgacctgaattagcgcctcgccccaacgaaagatatcgccgatatagacgtttttttccgtcagcccttcggtagatagattttcgccgaatgccggggcgcagaacagatcggcctgctgcgggaattcgcggatccagtcgaggtaatgctcgcggggatagtggcacagcgcgcgatccggcccgccgtgaattttcttttccgcctgctcgtccccttccagcccgagatcgccgagctgtaattcgccatcgacctggattttgccaattgcgctggggcggctaccgtcgtagtccctgattttgccgacaaagacattcaccggataatgcattgctgctctccttgctacggatataaaaaaagcgagtcatcagactcgcttctctcttagcacaatgcaaccttattttttggcggcaaaacgcgctgctgcttcgtcccagttcaccacgtcccagaaggctttgatgtagtccggacggcggttctggaatttcaggtagtaagcgtgttcccacacatccaggccgacaatcgggaagccggaagcgccggaaatggcttcgcccatcagcggggaatcctggttggcggtagaaacgacggccagtttgtcgcctttcagcaccagccacgcccagccggaaccaaagcgggttgctgccgctttttcgaattcagctttgaagttgtccacggaaccgaaatcacgctcgatggcggctttcaggtcgccctgcagggtggtgccggttttcaggcctttccagaacaggctgtggttagcgtggccgcccgcgttgttacgcagtacggtttttttgtcagccggcagttgatcaagcttagtgatcagctcttccgcagacaggttagcgaattccggcaggctttccagcgctgcgttagcgttgttaacgtaagtctggtgatgcttagtatgatggatctccatcgtctgcttgtcgaaatgcggttccagagcatcgtaagcgtacggcagggatggcagtgtataactcataatcatctccattattatcgggcggcagagggtgttaacgccgcgtaagcagtcggttcattatagttaattaaatgatattgaaaatgattatcaatgccgtagttttactaaggttatacccaaaatagatacacgccggtttgtgagccaaaacaacccattaagcccctgattgccagagtttcgtctgagatggcaacagctcaaaggcgtaaaaactgcgcaatttttacactcatcgcatcggagagagtctatccaacccaacacagatgagggtaaaggcaatgaatcatgcgattacgatgggaattttttggcatttaatcggcgccgccagtgccgcctgtttttatgcccctttcaagaaggtgaaacactggtcgtgggaaaccatgtggtcgatcggcgggattgtttcctggctgattctgccgtgggcgataagcgccatgctgctgcccgatttctgggcctactaccgctcgtttagcgcttccacgctgctaccggtgtttttgttcggcgcgatgtggggcatcggtaacatcaactatggcctgaccatgcgctatctggggatgtcgatgggtatcggtatcgctatcggcattacgcttatcgtcggtaccttaatgacgccgatcctcaacggccactttgatgtgttgattcacaccaaaggtggacaaatgaccctgctcggcgtgctggtggcggtgattggcgtgggtatcgtcacccgcgccggccagcttaaagagcgcaaaatgggcatcaaagcggaagagttcaacctgaaaaaagggctgatgctggcggtaatgtgcggtattttctccgccggcatgtcatttgcgatgaacgccgctaaaccaatgcatgaagccgccgcggcgctgggcgtcgacccgctgtataccgcgctgccaagctacgtggtgatcatgggcggcggcgcgctggttaacctcggcttctgctttattcgcctcgccaaagtgaaggatttgtcgctaaaagccgacttctcactggcaaaaccgcttatcatcagcaacattctgctttccgcattgggcgggctaatgtggtatctgcagttcttcttctatgcctggggccacgccagtatcccggcgcagtatgactacatgagctggatgctgcatatgagcttctacgtactgtgtggcgggctggttgggctggtgctgaaagagtggaacaacgccggacgccgcccggtcagcgtgctcagcctcggctgcgtggtgattatcatcgccgcgaatatcgtcggcctgggaatggctaactgatttccccttacgcggcggcgcgactgcgctgccgccactgtcccggcgtcatgccaatttcccgattaaacaccaccgaaaaatagttactgtcctcaaacccgcactgcatggcgatctcgccgattagccgctcggtatgctgcagtaaatactgcgcatggcagatccgcaactggcgcaagtagtgagttatcgtcattcccgtttgctggcgaaactgctggcgtagcgcgcgttcgctgcagccttcatgcagacagaagctatccagattaaaagggcgattcagacttccggccagcgccgttagcagtttatcgagctgtgtttcgctttgcgtcgccgccaggttatcagtggcgtagcgatagcgctggagcgtcaacaccagttgggcgaacagcagctccgccatgctatccgcctgcgcatcctgccgcgcgctttcgtgctccagctggttaatcacctgcctgacctgcgtcatcccactgctgccgatccgccagtgcggctgccacggcgtgccgaataatcccggaatatgcgccgcccagtcaaaattgagccgcagccgatccgggcaataaataatattctgcagcaccaggtcgttgaccgacgcataagagtgtttatcttccgcgcgaatataaaagagatcgccgcgggtaatccgccacgggcgatcgttgaggatatgcagaccgttgccgcgccacaccagcaccagctcgcaaaattcatgggtatgctcggcgaagacgttttgcgggtagcggtcagccaccgcgaccgcctgcgagggggaggcaaaaaactcatctttgcgaagcaccagctgacctgccacaactcttactcccgacgcggaaaccaaccattattcgcattttggtgaggcaatacgttgactcttctcgcgttactgaagaatagcgtcgcgcccctggcgaatatcgcgcggcgaccagtcgaattcacggcgaaatagcgtcgaaaaatggttactgtcgccaaaaccgcagcgataagcgatttctgtcacgctatcatcgctgtggcgcagcaggtgccgcgctttcatcaggcgcacccggttgagatagcgctggggcgtcagcccggtttgcagctttaactggcgatgcagggtgcgtaaagagagcgaaaactgcgccgccacctcctcccagcatatctcttcggcaaaatggtcttccagccaggccatcagctgattcagccgcgcctcgtggttgccggcgccttccgccaggctgttgctgtgcagtagcaccagtagctgcataaaaaggatttcacggctggcgatggtatggggctcgacgccctgcccgaccttttccatctggctgacgatttgccgcacctgctgtagcaccgtctggttgactcgccagtgtgaaagatagttgccgtcctgctcctgcggcagcagctggttcacgccggtcagaaaacgaaaagcatccggcgcgcggtagagcacgttggtcagacacaggttattggtgtgttcgtaaagatgacgatcgtgatcgcgaataaagcagaccgaaccgccgctgatggtatagggctggccgttgaaaacgtgaatgcccgtaccctgttcaacgatgacaatctcatgaaaatcatggtgatgttctggaaaggccgcttgaggaaggcgcggttcaatcgccaccgccgagacgccggccttaaagaaatccgtactgtgcaacacggtcatagcagcctccacgaatgagaaaaattatcaaccgtcgtcgcaaatagtaattaagggttagcaatccggccttcaatttttgaccgcaaaccgcgtaaaacctgcctttttttcaagaaccagccggaaatatccggaactgcggccagcatcacaccccgcctcgcgccgcccataaaacgaaactgtgacgcttctcacggtcacctttgctgtgttgccagccgcccgctttcgctgtcagtagcgagaaggtgacgcagagacgccttttttagactgcctgtaatgattttaataagggtcgtgccatgagtattcgtcattgtgtcgccgttgatttaggcgcttccagcggtcgggtcatgctcgcgaattatgacaccgcgacgcgcgcgctgacgctgcgtgaagttcaccgtttcgctaatcgcctgcaaaatgtggacggctacgattgctgggatatcgatagtctggaagcggaaattcgtcgtgggctggtgaaagtgtgcgaacaggggatcctgatcgacagtatcggtatcgacacctggggcgttgatttcgtcttgctggataagcgcggccagcgcgtcggcctgccggtttcttaccgcgatagccgtactcacggcctgatgacgcaggcaatcgaacacctgggccgcgccaatatttactgccgcagcggcatccagtttctgccgtttaacaccctttatcagctgcgggcgctggtcagccagcagccggcgctggcggagcgggtcgcccacgcgctgctgatcccggactacttcagctaccgcctgaccggcgcaatgaactgggaatacaccaacgccaccaccacgcaactggtcaatatcaatagcgataactgggatgacgagctgctccgctggagcggcgcgcagccggactggttcggtacaccgacgcatccgggcaatgttatcggccactggatctgcccgcagggtaaccgtatcccggtagtcgccgtcgccagccacgatacagccagcgccgtaatcgcctcgccgctggcggataaaaatgccgcctatctctcatcgggcacctggtcgctggtgggttttgaaagtaaaacgccttacaccagccagcaggcgctgaaggcgaatatcaccaatgaaggcggggccgagggacgctatcgggtgttgaaaaacatcatgggcctctggctgctgcagcgggtactgcaggagcagaacattagcgatctgcaggcgctgattgttgacacggcgatgctgccggcctgccgttacctgattgattgcaataatgatcgctttatcaacccggccaatatgagcgccgaaattcaggccgcctgcgcggagtccgcccagccgatcccggtcactcccgccgaactggcgcgctgcatttttgacagcctggcgctgctgtatgcccgggtattgggcgaactggcagcgctccgcggccgcccattcagccagctgcatatcgtcggcggcggctgccagaacgcgctgcttaaccagctgtgcgccgatgcctgcggcctgccggtagtggccggccccattgaagcctccacgcttggcaatatcggcatccagctgatgacgctggatgaactgcacaacgtcgatgaattccgtcaggtggtaggcgacaacgcgtcgctaaccacgttcacccacattcagatagcgaaattgcccgcttcgtcgcgcaatttcagccacaacctacaaaggagctttgcgcatgaccactcaacttgaacaagcctgggaaattgctaagcagcgctatgccgccatcggcgttgatgccgaagaagctctgcgtcagttggaccgtctgccggtgtcaatgcactgctggcagggcgatgacgtggcgggctttgaaaacccggaaggcagcttaaccggcggcattcaggccaccggcaactatcccggcaaagcgcgtaatgcccaggagctacgcgccgatctcgaacaggcgctaagcctgataccggggccgaagcgccttaatctgcacgcgatttatctcgaatccaccacgccggtagcacgtaatgaaatcaagccggaacactttaagcactgggtggaatgggccaaacgccaccagttggggctcgattttaacccttcctgcttctcacatccgctaagcgccgacggctttacgctgtcgcacgccaatccggagattcgtcagttctggatcgatcactgcaaagccagccgccgcatatccgcttatttcggcgagcagcttgggacgccatcggtaatgaatatttgggtgccggacggcatgaaagatattaccgtcgaccgcttcgccccgcgccagcggctgctgaacgcgctggatgaggtcatcagtgaaaaactcgatccggcgcaccatatcgacgccgttgagagcaagctgttcggtatcggcgccgaaagctataccgttggctccaatgaattctacatgggctacgccgccagccgtcaaaccgcattgtgcctggatgccggccacttccatccgacggaagtcatctccgacaaaatctccgccgccatgctctatatcccgcgcctgctgctgcacgtcagccgcccggtacgctgggacagcgatcacgtggtgctgctggatgacgaaacccaggccatcgccagcgaaattatccgccacaacctgttcgaccgcgtgcatatcggcctcgacttctttgatgcctccatcaaccgcatcgcggcgtgggttatcggcacccgcaacatgaaaaaagccctgctgcgcgcgctgctggagccgacggcgctgctgcgccagctggaaaacgacggtgattacaccgcccgcctggcgctgctcgaagagcagaaatcgctgccgtggcaggccatctgggaaatgtactgccagcgtcacgatacgccggcaggcagtcagtggctggaaaacgtgcggacctatgaaaaagacgtgctgagccagcgcggctaatgcctgatttccccggattgcgccgcacagggcttattcggggaatcacacctattgcgaatcaacaggaaagacaagactatgcacaacattatcaattcatggttcgttcagggcatgatcaaagccacctccgacgcctggcttaaaggctgggacgaacgtaacggcggcaatctgacgctgcgcctggatgaagcggatatcgcgccattcaaagccgattttcacccccagccgcgctatatcgccttaagccagccgatgccggaactggctaatcagccgtttatcgtcaccggttccggtaaattcttccgtaatgtgcagctcgatcccgccgccaatctcggggtggtgaaagtggacaacgacggcgcgggctacttcatcctgtgggggctgacggaagaagccgtgccgacgtcggaactaccggcgcatttcctgtcgcactgcgagcgcatcaaagccaccggcggcaaagatcgcgtgatcatgcactgccatgccaccaacctgatcgccctgacctacgtgctggagaacaacagcgatctgttcacccgcaagctatgggaaggcagcaccgaatgcctggtggtgttcccggacggcgtcggcattctaccgtggatggtgccgggcaccgacgagattggccaggcaaccgccggcgaaatgcagaaacattctctggtgctgtggccattccacggcgtcttcggcagcggcccgacgctggatgaaactttcggcctgatcgataccgccgagaagtccgctgaggtattggtgaaagtctattcgatgggcggcatgaaacagacgataaaccgcgaagagttgattgcgttaggccaacgctttggcgtcacgccgctggccagcgcgctggcgctctaagaaagcgagcgccttttaaggagaataatcatgagctttatgttggcactgccgaaaatcagcctgcatggcgctggcgcgatcggcgatatggtgagcctggtggcggacaagcagtggggaaaagcgctgattgtcaccgacgggcatctggtggaaatgggcctgctcgatagcctgtttcaggcgctggaagcgcatcaactgtcttatcatctgttcgataacgtctttccgaacccaaccgaagcgctggttcagcaaggtatcgccgcattccgtgcggcgcactgtgactatattatcgccttcggcggcggcagcccgatcgataccgctaaggcggtgaaaatactcagcgctaacccggcgccatcgactgcctattccggcgtgggcaaagtgaaaaatgccggcgtgccgctggtggccattaacaccaccgccggaaccgccgccgaaatgaccagcaacgcggtgattattgatagcgaacgtcaggtgaaagaggtcattatcgacccgaacatcatcccggatattgccgtcgacgatgccagcgtcatgctggatattccgccgtcggttaccgccgcgaccggtatggatgcgttaacccacgctattgaggcgtttgtctccgtcggcgcccatcctctgaccgacgccaacgcgctggaagcgattcgcttaattcatcagtggctgccgctggccgttgatgacgggcacaatctgcaggcccgcgagcagatggcatacggtcagtatctggcagggatggcgttcaacagcgcaggtcttggtctggtacacgcgctggcgcaccagccgggcgcgacccacaatttgccgcacggcgtttgtaatgccatcctgctaccgattatcgaaaactttaaccgcccgaacgcggtggcgcgttttgcccgcatcgcccaggcgatgggcgtcgatacgcgcgacatgagcgatgaaaccgccagcatggcggcgattaatgcgattcgcgcgttgagtaaacgagtcggtattcctgaaggttttagccagcttggcgtgagtaaagccgatatcgaaggctggctggataaagcgttggccgacccctgcgcgccctgtaacccgcgcagcgccagccgcgacgaggtacgcgagctgtacctggaggcattatgatccgcaaagccttcgtgatgcaggtcaatcccgacgcccacgaggagtatcagcgccgtcataaccccatctggccggaactggaagcgacgctgaaagcgcatggcgcgcaccactatgcgatctttctcgacaaacagcgccatctgctattcgccacggtggaaattgaatcggaagcccgctggaatgcggtggcggaaaccgaggtctgccaacgctggtggcgctatatgcgcgaggtgatgccgacgaatccggataacagcccgttgagcgctgaactgagcgaagtgttttaccttgcgtaaaaataaaacgcctgagcaatcaggcgtttttgctaccagagggattaggcatttttgcgcacaaagaaaccgtagcagcaggcgcccataaacagcagtatcccaccgagaataaatacgttggtaaagtgcccggtagcatcaagaataatgccggtgataatcggagccagcgccgcgccgagaaagccgccaaagttctggatagcacccaatgaggcgacctgttctttcggcgccatatcggtcgctaacgtccagatcacgccggaaggcatttgtgaacagaagtagcccagcgtcagcagcgcgatcgcaacgccgctattatcaacaaacggaatcggcatcacgaaacaggccgccagcgcggcgcccgccacaatcggcactttacgcgcggtaacggcgttcatccctttacgcaccagtctgtcagaaagcatcccgccgcacagcacgccgataataccggcaaagaaaggaatcgaggcgataaaaccggtctgcttgaggctaaaacccagcgaggtttccagatatcccggcagccatgtcagataaacccaaatggtaaacatgatgcagaagttaccggcaatcatgaaccacgtggttttccggcgaaacagttcgccccagctgaccttcggctgctcgccttcgggacgcatgactttgccggtgtttatcagcatcgcctcgcgcgcgtccgggtcgcgataaaatttaagccatgccagcaacaatggcagtccgagcagaccgacaaccatgaacatgccgcgccagccgatccataacagcaaaatagtcagcaccggcggcgctatcgcattggcgatttgcgaaccggtattgataatcgatgtcggcagcccgcgctctttctccgagaaccagctctgggtgatcttgataccggaagtgaagaacggtgactccgccacgcccagcagcatgcgcaaaccatagaaaaaactataggtattcacgaaacccattaagaacgttaccgctgaccacaatcccagcgcgccgctgaacattttcttcgcgccgaaacggtctaccagccagccggcgggcaaattcgccagcgcatagggccagagaaacgctgacaatagcagccccatttcagtaccagagaagccaaactccctggcgatggtggtgttcgcgatactcaggttggcgcgatccaggtaattgaccaccgcggccagcagcaggattaaaataatgacccaacgtcgacgcgagagtttcggcgccgcaatcgcttcagccgccgtttgatttagcgaactcataaaccctcctccagcaaggcgcgatcgattttcatcaccgctttacggatatgttgccgctcgccatcgcgcggatggcagcaggggcgatggatgtcctgtggaaagaagacagcgaacatgccgggcttcagggttatctgcatctcctcatcttcgacgtgccagaacaggatgtcctgctgcggcgtccgatcctcggtaacgcgaggacagccgctttctgcgcggctgacacccatccgctcctcgccggaaatcagatactgaatatcaatgaactgcttgtgcgactccggtcgcgcctgcgcgaaaggcacgctctccatctcctgcagcaggcagaaaagtttcccggggatcaggtcgattttccccggcgcgaagcgctggaaatcctggctggcgataaacgccagcgcctggcggatcgccggatgaaacgcggcctgttgcgcaggccacgcctgcagactcgatacgatcataatgatccctcccttagccggcgatccgctgctgccacagttcagtcccggcgcggatctggtcgaggatcaccgtcagcccccagaatttgctcagcacatcgtctttattaacccggcaggcgatactgtcgaaggtcccgaggcgctgatggtaaattttggcgtttttcgggtagcccagcgtttcggttaccgcgcccagcgacagaaatatcgccagttcatcggccagcgcccgctgatttttgccttcccgccacagccagctatacagttcgggatggaagttggtgaacacgccgctgaaaccttcggcgcccgccagcatcgctggccaggcgatcgcggcattggcgttgatgaccttcagcggggttccctgcgccagacgcacgcggcgctcaacggttggcagatcgcagctcacatctttcagcaccacgaaacgaccgctgttggcgcaccaggcgaactcgtcgtcgctaagcaagcggcgatacggcgccgggcactcgtacagtcccagcagcatggaggaaggcaaagccgccaacagcgattgcagggtagcgaaaaagacttcactgccctcattacgcggatcgagatgattagtgaccagcaccagcgcatcaatgccggtctgcgccattgccagcaactcctctttttgcgccgccagatcatcgctgatatggcccgaggcaatgactggaatgcgtcccgccacgcgttgcaccacgaaacgcgccagctcgacacgctcctgtaggctgagatattgcatttcgctggattggcagacggcaaaaagcgcatccacgccttttgccagataccagtcgatcagcttcgccagcgccggataatcaatctggtcgtcagcggtaaaaggggtcagcatgacgggtacaacaccgttaatcgttttcatcttatttttcctggattagagggtacggagtcgggcatttgcctgcgcaaagtcaggcatgttggaagccccctccagctcgacggccagagaggcgaaagcagaggcccaggttgcggcctgaaccagagtgttgccagcagccagcgaggcggcgagcgcgccattaaacgcatcgccagcgccggtggtatcgacggtgaccgccggaaaggcgcgaatttggctaaactggcgattatccagcagcagcgccccgcgcgaccccatggtaatcagcactttctttgcgcctaattcagcgatgcgcagcgcggcttctttggcagtatcaacatcgtgaatatcgataccggataataatgaagcctcggtttcattcggtgtaatcacatcgatataagggatgctttggataatttccgccgagtatggcgccggattgagaatgactgtcttaccgagttctctggctatttttattagcgaatgggtggcatcaaaattattctcaagctgaacaagtaaaacgtctgaggcggtcagctctggaataatcgcttcaatctcattatgcgttattgtagtgttggcgccagagtaaatagcaatcatattttcgccattttcctgcgaaacataaataatggcattgccggtaggttcgctctcagattgataaagcgtataggagtgtatgtctgaacgagtgagatgatcggccgccaggtggctaaactgatccttgcccaccttagcgacaaaatggacctgcgcgccggctttactggccgccgtcgcctggttagccccttaccaccgggcccaaggctgctggcgagagccagtagcgattctccgccgcgcggaaaacgctccactcgggccacgatatccacattaaatgagccgaatacacacactttgccgttcatcgattttcctttctgctgaccgctcgccgtaggtttccgatggttaatcggccgcagcagcacgccgaaactatcaccggtttcagaaataagttcagcctttaaattgtgccgggaaataatcgctccgccataacaacgttgcaccacccccatttctgcaagaatatttaaatcactgcgaatggtttcttttgaaacaccaaaataagcagcaaaataattaacaaaaccacgctcatgatcgtttaaatatttcaggatatgctttctacgttcttctaaaaacataattggccccaatgtcacaaattaagtatacgaaccccttccggcaggaagagtgacatcaatcccatgttttcaggcaaaacggaaggaaacaaaaatggaaaaacaatgaagaaaatgagtgaataaataattcactcaatcattaatgggaaatgaaataatcttctgcgcatcagaataaaatgcgcagattatgactaattttgctctgccaccagcagcgcctgggtatccggctccagcgcctgaaagagatgttcccgatcggccgggtagcagatgtaatccccttccccagctcttctggcgcttcggtgaggccaacgcgcgcgcgcccctgagtgataataatatgttcgaccgacccgggtgggtgtgggtgcgagatgcgatcggcgccgggctgcgtcaacagcagatagatgtcgcgacgcgcgccgggagggcatgccgccagcaaaatggcctgatagttggcctgttcagcaaccactttggtgccttcgccgcggcgaatcacctgggtctggttggcctgcggctccagtaagcgggcgaagggaatatccagcgccacgcacagcgcccacaatgtttccaggctagggttgccattgccggattccagctgtgacagggttgatttggctatcccggcgcggcgcgccacctccgccagtgagagtccggtgcgcgagcgctcgcgcgtcaggcttttagcaattacgctgatgggctgtgtcatacaccgctcctcgtattttatatcgaacgaatcgttcgccttgaaaaacaactctgttgcgttcattataatggaaattcgttcgatatggctaaagcgtatgcgttacaaattttcctgtctcagtggagacaccattaaagcaatcgttctggtatgcctggcggtcggcgtggttggcatgtcttacggttcattagcgatggcctacggttttccgctgtgggtgccatttgtcctttccattacggtgctggccggtgcttcggagtttatgtttatcggtattgtcgccagcggcggtaaccctctcgccgccgccgcggcgggtttactggtaaatgcccgccacgttccttttggcgtcaccgtgcgcgagctggtcggcacacgcgccgccagcctgctcggctgccacattatgaatgatgagagcgtggtgttcggcttgtcgcagaaaaccccggagcaacggaaagccgcctactggctctgcggcctgggcgtggcactcatctggccgctcggtaccctgctgggcgccggggtcgggaaattgttacccgctccggaaaccatcggcctggatgcggtattcccggccatcctactggcgctggtggtaccggcttttaaaaaacgtaccacactgattcgcgcctgcagcggcgcggttatttcgctggccgcggtgcccttcgcgccggttggattacctgttctgctctcattgtttggcttactggcgaggaaaaaataatggctaatatgacgctgtttatcgccgggatcgcgattctgtcgatcggcacatatctgatgcgtttgggtggggcaaagcttggcagtcgtttagccttttccgagcgctcgcaggcgctgctttctgatgccgcgacggtgttgctattttccgtggcgctggcgaccaccttttatgaaggcgagcatttttccggcatggcgcgggtacttggcgtcggttttgccgtgttccttgcctggcgcaaaatgccgcttatcgtggtgattatcgccgcagcggtggtgacggcgctactgcgcctggcgggtataaactaaaaaagcgccctgaggcgctctttcgacggtagtgggttgctaacttatttattcagttcagcggtcatatgcacgcggttaccgttaaacgcttcggtaatggtgtaagaagacgcaccggcagcctgcgcctgagcggcgattttcgcttccgcggcgtccatagtggaggcggtggcggtcacggattgcgcggcaaaagaaccgaaagaagcggccagagcgataacagcgacaaaagttttgatgcttttcatgatataaaccctttcatttagttgtttggataaggcaccgtgccttgatgtgataaataatagtcttcacatcccgtaactaaaagcggaaggatttgctgtcatctttcaaaaaaactgaccaacatttaaccggcaataagacgctgcggatgagtataaatcgttgctctgcctggcctgcagaaccccaccagcgttagattacaacgttcggcgacttccaccgccagcgtcgtcgccgcggagaccgcaaacagaatttccaccccgcacatcgcggccttctgtaccatttcataactggcgcggctggagactaaggctgcgccccgctgccagccctctccttctgcactacggcgacccagcagtttatccagcgcaacgtgacggcctacatcttcatgcccgcccgccagttcaccgtcagggcgcacccacgcggcggcgtgtgtacagccggtcaggcggccgattggctgaacctcatttaactgtttgagcgcgcgatcgagatgagagagcgcaaaggtctggctgaagggcagcggctcgacgggcttaccgatatcatttagctgctcgacgccacatactccacagcctgtacgcccggcgagcgcccggcggcgctctttcaaccccataaaccggcggctggagagttcgatttgcacttctaccccgttacaggcctgtaccacgtccatcccgtagatctcttgtcggctttgtataatcccttcagatagggaaaaaccgacggcgaaatgttccaggtcacgtggcgtcgccatcatgacgacgtgcgagatgccgttataaaccagagcgacgggtacctcttctgctacctcgtctggctgaggatgttgcaaatcctcacgtttccagagggtaacctggcgataacctgtgacatctgtcacatttttgatttgttcaggaaggttcttattcactttcatttaaccgtattggaacaggcatacacacaatgtggtattctgtttttatatccctccaggaccgagggaaattaactcaattctgaacctttgcggccttcaccgcaaagtaaataactacatgtgacaatgtcgaaacaaggagcgaaccatgcaggtcagcagaaggcagttctttaagatctgcgctggcggtatggcaggcacgacggcagcagcgctgggctttgcaccggctactgcgctcgcggaaacccggcagtacaaactgctgcgtactcgcgaaacccgcaacacctgtacgtactgttccgttggctgcgggctattgatgtatagcctcggcgacggtgcgaaaaacgccaaagcatccattttccatatcgaaggcgatccggaccatccggtaaaccgtggtgcgctctgcccgaaaggggccggtctggtggactttatccattctgaaagccgcctgaaattcccggaatatcgcgcgccaggttctgataaatggcagcaaatcagctgggacgaagcgttcgatcgcatcgcgaagctgatgaaagaagaccgtgacgccaactttatcgcccaaaacagcgccggcactaccgttaaccgttggctgaccaccggtatgctgtgcgcctccgcttccagtaacgaaaccggctatttaacgcagaaattcacccgcgccctcgggatgctggcggtggataaccaggcgcgtgtctgacacggaccaacggtagcaagtcttgctccaacatttggtcgcggtgcgatgaccaaccactgggttgatattaaaaacgccaacctggtcgtagtgatgggcggtaacgccgcagaagcgcatccggtgggattccgctgggcgatggaagccaaaattcataacggcgccaagctcatcgttatcgatccgcgctttacgcgtacggcgtcggtggctgacttctataccccgattcgttccggtaccgacattaccttcctgtcgggcgtcattctgtacctgctgaataacgaaaaattcaaccgtgaatacaccgaagcctataccaacgccagcctgatcgtgcgtgaggactacagctttgatgatggtctgttcagcggttacgatgccgaaaaacgccagtatgacaaaaccagctggaactatgagctggatgaaaacggcttcgccaaacgcgataccacgctgcagcatccacgctgcgtctggaatctgctaaaacagcacgtttcccgctatacgccggatgtggtcgaaaacatctgtggtacgccgaaggccgatttccttaaagtttgcgaatatattgcagaaaccagcgcgcacgataaaaccgcgtcgttcctgtatgccctcggctggacccagcactccatcggcgcgcagaacattcgcaccatggcgatgatccagttgctgcttggcaacatggggatggcaggcggcggcgtcaatgccctgcgcggtcactccaacatccagggtctgaccgacctcggcctgctctcaaccagcctgccgggatacatgtcgctgcctaatgaaaaacaggccgatctgcagacctacctgagcgccaacacgccgaaaccgctgttgaaagaccaggtgaactactggggcaactatccgaagttcttcgtctccatgatgaaagccttcttcggcgataaagctacggccgagaatagctggggctttgactggctgccgaagtgggataagagctacgacgtgctgcagtatttcgagatgatgaatcagggcaaagttaatggctatatttgccagggctttaacccggtcgcctctttcccgaacaaaaacaaggtggtggcttccctgtcgaagctgaagttccttgtgaccatcgatccgctcaacaccgaaacgtccaccttctggcaaaaccacggtgagtccaacgatgttgacccggcgaaaatccagaccgaagtgttccgcctgccatccacctgcttcgccgaagaaaacggttctatcgtcaactccggccgctggctgcagtggcactggaaaggcgcggacgccccggggatcgccgtgaccgatggtgaaatcctcgccggtatcttctcgcgtctgcgtaagatgtatgccgaagaaggcggcccaacgccggagccggtgctcaacatgacgtggaactactccacgccgcacgagccggcgtcggaagaagtggcgatggaaagcaacggtaaagcgctggcggatattaccgatccggcaaccggcgcggtaatcgttaagaaagggcagcagttgagctccttcgcacagctacgcgacgacggcacaacttccagcggctgctggatcttcgccggaagctggacgccggaaggcaaccagatggcgcgccgcgataacgccgacccgtcaggcctcggcaatacgctgggctgggcctgggcatggccgctaaaccgccgcattctctataaccgcgcctccgcggacccgcagggtaaaccgtgggatccgaagcgtcagttgctgaaatgggacggcgcgaaatggggcggagtggatattccggattacagcgccgccgcccctggcagcgacgtcggtccgtttatcatgcagcctgaagggatggggcgtctgttcgctatcgataagatggctgaagggccgttcccggaacactacgaaccgtttgaaacgccgctggggactaacccgctgcatccaaacgtggtctctaacccggccgctcgcgtctttaaaggcgatctcgagcagatgggcaaggccgagaagttcccgtacgtcggcacaacttaccgcctgaccgagcacttccactactggaccaaacacgcgctgcttaacgccatcgcgcagccggaacagtttgtggagatcggcgaaaaactggcgaataagctcggcattggccacggcgatacggtgaaggtctcctctaaccgcggctatatcaaagccaaggcggtggtgaccaagcgtattcgtacgctgcaggttcacggtaaagaggtggataccatcggtattcctattcactggggctacgaaggcgtggcgaaaaaaggctttatcgccaatacgctgacgccgtttgtcggcgacgccaacacgcagacgccggagtttaaggccttcctcgtgaacgtggaaaaggtgtaacggagacgacttatggcttatcaatcgcaagatattattcgtcgttccgcgactaacggtttcactcccgcgcctcaggcgcgggaccaccagcaggaagtggcgaagcttatcgatgttaccacctgtatcggctgtaaagcctgccaggtggcctgttccgaatggaacgatcttcgtgacgaagtgggtaacaacgttggggtgtatgacaacccggcggacctgaccgctaagtcatggacggtcatgcgcttctcggaagtggaacaaaacgacaagctggaatggcttattcgtaaagatggctgcatgcactgcgctgacccgggctgcctgaaggcctgtccgtcagaaggcgcgatcattcagtacgctaacggcatcgtcgacttccagtctgagcagtgtatcggctgcggctactgcatcgcaggttgcccgttcgatgtaccgcgcctgaacccggaagacaaccgcgtctacaaatgtacgctgtgcgtagaccgcgtgaccgtcggccaggagccggcctgcgtgaaaacctgcccgaccggcgctatccactttggttcgaaagaggatatgaaaacgctggccggcgagcgcgtcgcagagctgaaaacccgcggttacgacaaggcgggcctgtacgatccggctggcgttggcggcacccacgtgatgtacgtgctgcaccatgccgataaaccgaatctctaccacggtctgccagagaatccggaaatcagccaaacggtgaaattctggaaaggtatctggaaaccgctggcggcggtcggctttgctgcgaccttcgcagccagtatcttccactacgtcggcgtcggtccgaaccgcgcagatgaagaagaagacaacctgcatgaagagaaagacgaggtgcgcaaatgagaaaacgtgacaccatcgtgcgctacacggcgccggaacgcatcaaccactggataaccgccttctgctttattctggcggcggtaagcgggttaggctttttcttcccgtcgtttaactggctgatgcatattctcggtacgccgcagctggcgcgtattctccacccgttcgtcggggtggtgatgttcgcgtcgtttatcatcatgtttttccgttactggcatcacaacctaatcaatcgggatgatatcttttgggcgaagaatattcgtaagatcgtcgtcaacgaggaggtaggcgataccgggcgttataacttcggccagaaatgcgtattctgggcggcgattattttcctggtgctgctgctggtaagcggcgtgatcatctggcgtccgtactttgcgcctgcattctcaatcccggtgatccgattcgcgctgatgctgcattcttttgccgcagtcgcgttaattgtggttatcatggtgcatatctacgccgccctttgggtgaaaggcaccattaccgcgatggtggaaggctgggttaccaaaacgtgggcgaagaaacatcacccgcgctggtaccgtgaagtccgccagaaacaggaaaaatagactgcatgagtattcgcataatcccgcaagacgagctgggttcgagcgagaaacgcacggcggaagcaattccgccgctactgttccccagactgaagaatctttataaccgccgcgcggagcgtctgcgcgagctggccgccaacaacccgctgggcgattacctgcgctttgccgcgctgatcgctcatgcgcaggaagtggtgctttacgaccatccgttgcagatggatctgactgcccgcattaaagaggccaacgatcagggcaagccgccgctggatattcacgtattaccgcgtgataaacactggcataagctgctgcattcactgatcgccgagctgaaaccagagatgagcggcccggcgctgtcggttatcgagaacctggaaaaagcctccgggccggaactggaagagatggccagcgcgctgtttgcttccgatttcgcctcggtcagcagtgacaaagcgccgtttatctgggccgcgctgtcgctgtactgggcgcaaatggccagcctgatcccgggaaaagcgcgcgccgaatacggtgagcatcgccagttctgcccggtttgcggctcgatgccggtttccagcatcgtgcaaatcggcaccactcaggggctgcgctatttgcactgcaacttgtgtgaaaccgaatggcatgtggtacgcgtaaaatgcagcaactgcgaacagagccgcgacctgcactactggtcgctggataacgagcaggcggcagtgaaagccgaaagctgcggcgactgcgggagctacctgaagattatgtatcaggagaaagacccgaaagtcgaagccgttgccgacgatttagcctcgctggtactcgatgctcgcatggaacaggaaggcttcgccagaagctcaattaacccgttcatgttccccggcgaaggggagtaagttctgcacacctataacgggcgactcaggtcgctcgttatcattcatacggcgtgaccacgccggaaatgctctccttatcccgatcctgcttctccagatattgttcaacagaagaagcagatctttgctgagaaatacgcttttgcgagccgctttccacaatgcgatcgcggctttattcggtatatctttttcgcaaaaaccaggctataacactggatattaatccagtaaaagggacttgccatgacgttggaaaaaggtattgcttcgctggttgaggagtttattgctgcggggcggccatcatcacgggaacagagtattgatgaccggagaaacggctatctcgccagcgccgttctcgcaggggaaacggaaacgcgtgtgcaggttgaagacatcacgctcgatggcatgaccctgcgcgtcgtctcgccgccaaaaagcaacggcttgctacccaccattgtgtattaccacggcggctgttttgtgagcggcggctttgccacccatgacaaccaattgcgccagcttgcctggttcagtgggtgccgggtgatcgccgtgcagtaccgcctggcgccggagtacacttttccggcggcgcacgatgatgcggaacgaggcgccaacattatctatcggtatgcgcagcggcttggcgttgacgccgcgcgcatcacgctggccggcgacagcgccggcggccacctcgccctggtcacagcgctacgcctgaaagcggccggagtatggcaacctgcgcagcttatcctgatttaccctatgctcgacgctaccgccagcatggcaagctacgccagcaacggcgaggattacatcattacccgggatacgctgcttagcggctacgaaatgtatttagcggccacacccgctacccatccggaagccagtccgctgtggcgggaagattttaacgggctgccgcctgttcatatcctgacggccgaatttgaccctttgcgcgatgagggagaagcactgtaccggcggttaatagcacagggaatagaaagcacctgccagcgctatctgggcgtcattcacggtttctttcagttaggcgggataagcctcgcggcaaggcaggcgatgcgcgatatcgcctggcgtacgcaaacgccaggccaataataataccggaggcgggttactcttcctcgttcccgccctcttcataagaaccaaacggtttcgcgggcagtacgatataggttccctcaaaaacggcgcccagcttatcgttaccgaacagttcgacctgaagctgcacgcgagccttacgcccgcgcgccaggcgatcgagatcgccgcttagcgagcctaaatcggctacggcattcggcctcccgctaattggcttgctgtaacggatatgcgcatcggcaaggataatcgtgccgccaagatgccgctcgcgcagcattaaccagattagcccccagccggttaaggtagcgagcgaaaacaggctgccggcaaataacgtatggtgcggattctggttccccgcttcgggcatggtggtgataaatttctgcccggtatactgctgaatgcgcacccccatcttttcgctcagcggaatgtgctgataccaggcctgctgcagctggccgcaccagtcgccgcggtgcaggatgtcgtccagtgaagcaatgggtttaatcatcaagaagtggcgaatcggcgtcgttgttggcgtggtgatttcaccctggttcacaaagcccagcttagagaaaaactccatcgcatcttcacgggcgctacaggtcacccgcttcaccccttcctgacgggcgactgactcaagggtcatcgccataagggtgcctaaacctttatcctgaacggaaggatgtacggccataaaacgaatcgaggcttcattctccgcattaatatacagccggccgacggcaaccaggttgccctcttcatcgacgaccatctgatgatgcgccatggcatcccaggcgtcgcgttccgatcctttaggctgatgcagcggcttacgcaacatttcccagcggaactgataatagctttctaactcttcttctgtttgcggtacacgaaggtgatacatagctgtactctcttttgttacccgcagcctgcccggaagctgactcatacctgcaaccaaaaggtcacgggaccatcgtttaccagcgagacctgcatatccgcagcaaatctcccggtctgagtattcatttcttgttggcggcagcgctcaacaaagtattcatacagcgcttccgctctttccggcgccgcgcctttggaaaaactcgggcgcataccgcgctcggtatcggccgccagcgtaaactgcgaaaccaccagcacgctgccgccagcctgctgaacattgagattcattttgccttcggcatcgctgaaaatgcgatagccgagcacccgttcacatagacgattggccttctgttcatcatcgtctttctcgacgcccagcagcaccagcagccccggaccgatttcacccgtcacttcaccctccacggtaacgcttgcacgggatacgcgttgaattaatgcaatcatggttgttctgtttcttcttttttgagtttgcggtattcaccgagagtgacagttatttcagcgccaagcaagacgatacaccaggtccagtaaacccagacaaacaaaatgggtactaccgcaatcacgccataaatcagctggtatgacggaaacatggtgatatataaagcaaaagcctttttaccagcttcaaaaagcagtgccgccaccagtgaaccgattaccgcatcgcgattgcgcacctgggtggtgggcacgatgctataaagcatccagaacgccgcccacgataagattagcgggaatatacggagtacatcatcgatgacgctattgagatcgctggcccagcgtagtgagagaagataggaactgattgccagactggcgccggccaacagcggcccgagagtcaggatcatccagtagaccgcaaatgaatagattttgggccgcgtccgactgctgcgccagatggtgttcagcgcgctatcaatcgaatacatcagcagtaatgaggtgacaattaatccaaaggcgccgacggccgtcatcctgctggagttcgccacaaactgttcgatatatccctgaatgacatcgccggtcgccggaatgaagttggcaaagataaaatggcggatctgcacgctgacgtcggagaacatcggaaaggcggcaaacagggcaaaaaccacggcgatcagcggcaccagcgcaagtaaagacacgtaggccagattccccgccaacgtagtcatgttgtcttcttcaattcgccgccacagcagcttaagccaggccaccagcggcctggtatggtgtttggttttttgatgaacgctttttagcatagctgcttcgcaaagtagttggggatggtctccttatccgtgaccagaatactggtgatccccaactggttagccccagctatattatcggcgttatcgtcgaaaaagaccgcgtcttgcggcgaaaatccttctgcctgcagcacgctttggtagatacgcgtttcgggtttgcgcatccccatctcttgcgaaagatacacatgatcggtggcagcacgcacttgcggatattcgcttggccagaaagtggtatgtaatcggttggtgttcgagagcacgaccacgcggtgcccctggtcgcgaagtttttgcatgatgtcggtgatttctggacgcaaggcgacaaaaacggcctgccaaccgtgggcaaactgttcatagctcagcggcatgttcatttcgtggcacatcgcggcggcaaactcttcgtcgctgatctccccgcgctcatgctggtggaaagcatcgcccatgacaaagtcttgctttagcgtcgccagcgggatgcgggtcaaatcgctccacgttccgagcacccggttgaagtcaatgtcgacaatcacattacctaaatcaaagatatagagcatttttgtctccttccgcgccgttgaagattaactgtagcgggaaagaagaggtttgactatcgacggcgtgaaaagcgcccaaaaagaaaccccgccgttgtggcggggtttagcttgcaacaagaagggtaaattactcttctttagcaccgcgcatagcgcgtttacggtcgttctcggtcaggtgacgtttacggatacggatagacgtcggagtcacttctaccagttcgtcgtcatcgatgaactccagagcttgctccagggtcatcttaaccggcggaaccagaaccgttgcttcgtcagtaccggacgcacgcatgttggtcagtttcttaccggtcaggcagtttaccgtcaggtcattagagcggctgtgaataccgataatctgaccttcgtaaacttcagcgccatggccgaggaacagcttaccgcgatcctgcaggccgaacagtgcgaacgcaaccgctttaccctgaccgttagagatcagcacgccgttgttacgctggcccacttcgcccggacgaacatcatcgtagtggctgaaggtggagtacagcagaccggtaccagaagtcatggtcatgaactctgaacggaagccgatcagaccacggcttgggatcacgtagtcgagacgtacgcggcctttaccgtctggattcatgtttttcaggtcgcctttacgctcacccagcgcctgcatgacagaaccctggtgctgctcttcgacgtccagcgttacgttttcgaacggctcttgtttacggccatcgatttcgcggaagataactttcggacgggaaaccgccatctcgaaaccttcacgacgcatgttttcaatcagaacagacaggtgcagttcgccacgaccagaaacgcggaacgcatcagcgtcttcggtttcttcaacgcgcagcgcaacgttgtgtaccagctctttgttcagacggtccaggatctggcgagaggtaacgaacttaccttctttaccgcagaacggagaggtgttgacgttgaagaacatagatacggtcggctcatcaacagacagtgccggcagcgcttcgacgttctgcgggtcgcagatggtgtcggagatgttcagctcgcccagaccggtgatcgcgatgatgtcgccagcttcggctacgtcgctctcgatacgctcgagacccaggtgagtcagtactttaccgactttaccgttacgggttttcccttcgctatcgatgatagtgatctgctggttcggcttcactttaccgcgcttgatgcgaccaatgccgattacgccaacgtagttgttgtagtcaagctgggagatttgcatctgcagcggaccgtcaaggtcaacgtccggcgccggtacacggtcaacaatcgcctggtacagcggggtcatgtcgtcagccatgtcttcgtggtccagacccgcgataccgttcagcgcggaagcgtaaacgatcgggaagtccagctgttcgtcggtcgcgtcgaggttaacgaacaggtcgaatacctggtcgacaacccaatccggacgcgcgcccggacggtcaactttgttgatgaccacgatcggcttcagaccgtgagcaaacgcttttttggttacaaagcgcgtctgcggcatcgggccgtcaaaggcatcaaccaccagcagcacagagtcaaccatggacataacacgctcaacttcacctccgaagtcggcgtgccctggggtatcaacgatgttgatacggtaatcattccatttgattgcagtgtttttagcgaggatggtaatcccacgctctttctccaaatcgttggagtccatcacacgttcttgtgcttcagtacgtgcgtcgaacgtaccggattgctgtagcagcttatcaaccagggtagttttaccatggtcgacgtgcgcgatgatggcgatattacgcagattttcgatcacaactttgcctcaggcattagaaatagcgcgttattgtacacgtattaagcgaaggactgaacaggatcacaaagatcctccgcaaacaagtattgcagagtttgtttgtgaccgctttcacggagcgataaaagggcaccgtaataaaaattgcaccaaaatggtgctcaatgttcacatcgaggcactattttggtgcattatctccatcatggtgcagtccttttgcactatggtgcgcatgatacagcgttttaccgtacttttaaaagttggcacagatttcgctttatattttttaaggcaacaacgccacttttaagtagtaagaagttcgttaccacgacgacaatgaccaatccgggagagtttaagtatgtccgctgaacacgttttgacgatgctgaacgagcacgaagtgaagtttgtcgatctgcgcttcaccgataccaaaggtaaagaacagcacgtcacgattccttcccatcaggtaaatgccgaattctttgaagaaggcaaaatgtttgatggctcctcgattggcggttggaaaggtattaacgaatccgacatggtcctgatgccggatgccaccacggcgctgatcgacccgttctacgaagaaccgacgctgatcatccgctgcgatatcctggaaccaggcaccctgcaaggttacgaccgcgacccgcgctctatcgccaagcgcgctgaagaatacctgcgcgccaccggcatcgccgacaccgtgctgttcgggccggaaccagaattcttcctgttcgacgacatccgctttggcgcatccatctctggttcccacgtggccattgatgatatcgaaggcgcatggaactcttctaccaaatacgaaggcggcaacaaaggccaccgtccgggcgtgaaaggcggttacttcccggttccgccggtagactcctctcaggacatccgttctaccatgtgtatgatcatggaagagatgggcctggttgttgaagctcaccaccacgaagtggcaactgcaggtcagaacgaaatcgccacccgcttcaacaccatgaccaaaaaagcggacgaaattcagatctacaaatatgttgtacacaacgtcgctcaccgtttcggtaaaaccgcgaccttcatgccaaaaccgatgtttggcgataacggttccggcatgcactgccacatgtccctgtccaagaacggcgtaaacctgttctccggcgacaaatacgcgggcctgtctgagcaagcgctgcactacatcggcggcgttatcaagcacgctaaagcgatcaacgccctggcgaacccgaccaccaactcctacaagcgtctggtcccgggttacgaagcgccggttatgctggcttactccgcccgtaaccgctctgcttccattcgtatcccggtggttgcctcgccgaaagcgcgtcgtatcgaagtgcgcttcccggacccggctgctaacccatacctgtgcttcgccgcgctgctgatggccggcctggacggtattaaaaacaaaattcaccctggcgatgcgatggacaaaaacctgtacgatctgccgccggaagaagcgaaagaaatcccgcaggttgcaggttctctggaagaagccctgcaggcgctggacgcagaccgcgagttcctgaccgcaggcggcgtcttcactgacgaagctatcgatgcttacatcgccctgcgcattgaagaaaacgaccgcgtacgtatgactccgcacccggttgagttcgaactgtactacagcgtctgattttgctgtaaatccatggtgttcccgtgttgtggcacgggataccagggatgttttgttgccgtggaaactttcagcccatctcaggatgggcttttttctccagcaacacgctgatctctcgcgctttttaccaataaaaagctatactgcactaaaatagtgcaaccatttcaggagactgtcagatggcaacaggcacacagcccgatgctgggcagatcctcaactcgctgatccacagtatcttattagtcgatgacgacctcgcggtgcattacgccaacccggctgcccagcagttactggcgcaaagctcgcgtaaattattcggtacgccgctgccagaattgctgagctacttttcgttaaacattggcctgatgcaggagagcctgcaggcgggtcagggcttcacggataatgaagtgacgctggtgattgacggccgctcgcacattctctccctcaccgctcagcgcctgcctgaaggctatatcctgcttgagatgtcgccgatggataatcagcgtcgtttgagccaggaacagctgcagcatgctcagcaggtggcggcgcgcgatttagtgcgcggtctggcgcatgagattaaaaacccgctcggtggcctgcgcggcgcggcgcagctattgagtaaagcgctaccggatcccgcgctgatggaatatacccaggtgattattgaacaggccgacaggttacgtaacctggtcgatcgcctgctggggccgcagcatcccggtatgcacatcacggaaagcattcataaagtcgcggagcgtgtggtggcgctggtctccatggagttgccggataacgtcaaactgatccgcgattacgacccgagcctgcctgagctggcccacgacccggaacaaatcgagcaagtgttgctgaatatcgtgcgcaacgcgctgcaggccctggggcccgaaggcggcgaaatcatcctgcgcacccgtaccgcctttcagctcacgctccacggcgtacgttaccgtctggcggcgcgtatcgacgtggaagataatggtcccggtatcccaccccatctgcaggatacgctgttttaccccatggtcagcggccgcgaaggcggtaccggtcttggtctttccatcgcccgcagtcttatcgatcagcactccggcaaaattgaatttaccagttggcctggccataccgagttctcggtatacctgcctattcggaaatagaggtgtttatgcaacgagggatagcctgggtagtcgatgacgatagctccatccgttgggtgcttgaacgcgcactcaccggagcgggtctaagctgtaccacatttgagagcggcaatgaggtgcttgatgccctcactaccaaaacgccggacgttttactctccgacattcgcatgcctgggatggacggcctggcgctgttaaaacagattaaacaacgccatccgatgcttccagtcatcattatgaccgcgcactcggatctcgatgccgccgtcagcgcctatcagcagggcgcctttgattacctgccgaaaccttttgatattgatgaggccgtggcgctggttgaccgtgcgattagtcattatcaggagcagcagcagccgcgtaatacgccggtcagcagcccgacagccgatattattggcgaagcgccggcgatgcaggatgtgttccgcatcattggccgcctgtcacgctcctcaatcagcgtactgatcaacggcgaatcaggtaccggtaaagagctggtcgcccacgcgctgcatcgccacagtccacgcgccaaatcgccgtttatcgcccttaacatggcggccattccgaaagatttgattgaatcggaactgttcggccatgaaaaaggggcctttaccggcgccaataccgttcgtcaggggcgttttgaacaggccgatggcggtacgctgttccttgatgaaattggcgatatgccgctggatgttcagacgcgactgttacgcgtgctggctgacggccaattttaccgcgttggcggctatgcgccggtgaaagtcgatgtgcggattattgccgcgacccaccagaaccttgagctacgcgtacaggaaggaaaattccgtgaagatttgttccatcgcctgaacgtgattcgcgtgcatttgccgccgctgcgcgaacgccgggaagatattccacgcctggcgcgccacttcctgcagattgccgcccgcgaactgggcgtcgaagccaaacagctgcatccggaaacggaagcggcgctgacgcgactggcctggcccggtaacgtacgacagctggagaatacctgtcgctggttaacggtgatggcagcaggccaggaggtactgacccaggacctgccgggcgagctgttcgaaacgtcgattcccgatagcccaacgcagatccaaccggatagctgggcaacgctgctggggcaatgggccgaccgtgccttacgttccggtcatcaaaacctgctatcagaagcgcagccggagatggaacgtgcattactcaccaccgcgctgcgtcatacgcaagggcataagcaggaagccgctcgtctgctgggctggggcgaaatacgttaacgcggaagctgaaagaactggggatggaataacacctgacccagcggcgaaatgaatacccggtgagttggctcaccgggattcgcttaaataacgcgagagaattgctgcaggcgcgctttctgccgcaaataggcatcgaagcacatacagatgttgcgaatcaacagacggccttttgccgtaacctgtattcctttttcatccacatccaccagcccgtctttcaccagcggcgccagcaatttcatatcttcggcaaagtaatcgttgaagataagatcccactgcgcttcaaccgccgcgaactcaagacggaagttgcaaatcagggctttaatgacatcccggcggatacaatcatcgcgggttaacgcaataccccgccacaacgcggtgccgctttcatcgacctgctgataatactgtttcagctctttctggttctgcgcatagcagtcgccaatcatactgatcgccgacacgcccattccaagcaggtcggtatcgccctgggtggtgtacccctggaagttgcggtgcaacacgccttcacgttgggcaatcgcgagttcatcgtccggccgggcaaagtggtccatgccgataaactgatagccagcgtcggttagcgaagcgatggtttcctgcaggatatccagtttctgctctgcgctcggtaaatcagcgtctttaattttgcgctgcgcagcgaatagcgtaggcagatgcgcgtagttaaatacgctcagacggtcaggattcagttctgcgactttctgcagcgtgaaggcaaagctttccggcgtttgcttcggcagaccgtaaatcaaatcgatgttggtcgatgtgaagccaatctcacgtgcatgacgcagcagcgcaaagatgaattcttcatcttgttcacggttcaccaggcgctgcacttctttattgaaatcctgcacccccatgctcaaacggttgaatcctgcagatcgtaaatgatccagtacatccagttcgatttcacgcggatcgacttcgatagagatttcagcatcggcgttaaagctgaagtggccgcgcagcagattcatcaagcggctgatttgcgctttgttgagataggtcggcgtaccgccgccccagtgcagttgactaacctggcggccggcaaaaagcggcgcgcgatgaataatttcctgctcaaggacatcaagatactgatcggccttatgctgttggcgggtgacaatcttattacagccgcaaaaatagcagagcttatggcagaacgggatatggacgtacagcgacagcggccgctgcgggtagcggtccacggcggcggcaaaatcagcagcgccgaacgccggagaaaactccagcgcggtgggatacgaagtatatcgcggcccggaatagttatatttctggataagggccagatcccagtcgattaactgctcagacatgctcactccttccgatgatgccgccgacgggtacgtcgtgccggcccaaccgcatctcgggtcatgagccggttgcgcagccatttttgacgccgcgacaaccgtcttagtttaacgaataaccacagcagataacatataaccagaagggttataagcaggaccgggaatccgatgggatgcaaacgttagtttccacccttcagcagacgcatcatatcttcctgacgctcttcttcttcctcatcttcgtcgtcatcataggagagaccaagctgctgcatcagcgcgtcaatacgatccagtttggcatcaacccaggcctgctcttcagcattcagggtaccgccttcttccagacgttccagcagcgcgtccaggcgctcatcattctccagcaaatccagctcagcctgcggtgaaagcataggtttctcgctcttcggtttgtgctgcttaacggccggggtgctttctgtcacgcccagcgggatcggttttttgctgccaatgcgtgggtcctgctgctggctgcggcctttgcctgctgaagcagcatcgccgccgctggcgcggctgcctgcggcatggccacggtgttttttctgacgtttacggtcgcgtgcttcctggttcaactcttcacgcgacttaccacgtgctttaccgcgcgatgcggatgccggttttttcatgatgtgtgatcttcagacagttttcttcagtatagaattgaggcggaatctagcagaaagcaagcaaagaaaaaaggcgacagattaatctgtcgcctttttccgcactcacaacccttaacgggtttccactttccatgtcagctatcgacttaccctgtctttcccttagcttccaacggtccttgttctatccctttcccttttaaaacgtctccagacgtttgtcatcctgacaatcccggtcttcgcctcctggcgctcctgacccctcgtcctgagtcgtaatcctccggcatcctcgcctttgcccactactttaccgttttgccggaaatcgacaaccacctgtaggatgaaaagcctgcttaagggaatagagtttcctgtaacagtatgatttaacgataatctatgaatttgacgtcaggtttttctcacaaatttcgtatagtccttatggacaatgtctcacaaagctcatggtttttacttacaacgccgacgtgcggtaaaaacagcctttttctgcctttcaggtataatccccgccatagcctgattttacggagacgacagtcttgaccaactggaattatcaacagacgcattttgtcacgagcgcgcctgatatccgccatcttccatccgataccggaatcgaagtggcattcgctggccgctcaaatgcgggcaaatccagcgcccttaatacgctgactaaccagaaaagcctggcgcgtacctcaaaaacgccgggtcgtactcagcttatcaacctgtttgaggttgcggaaggtaaacgcctggtcgacttgccgggatatggctacgcgcaggtgccggaagagatgaaaatcaaatggcagaaggcgctgggtgagtatcttgagaaacgtctgtgcctgaaaggcctggtggtattgatggatatccgtcatccgctgaaagatctcgatcagcagatgatcgaatgggcggtagaaagcgatatacaggtgctggtcctgctaaccaaagccgataagctcgccagcggcgcgcgtaaagcgcaggtcaatatggtgcgtgaagcggtactggccttcaatggcgatatccaggttgagcctttctcttcgctgaaaaaatctggcgtggataagttgcgtcagaagctggatagctggtttaacgacatcccgccgcaagaagccgccgaagacgcagagtaacccccgctttttccggataatggcgcccagcgccctatccggacgttcattttacgcggttgtcagcgcgtaaaacttttctttcgcgcaataaaaaacgccccggtcataaatgaccggggcggctaaaatattcagccaaatccgattacgtgaagtaaaaggtctgaaagatagaacatcttacctctgtaccctacgcgaataactttactcttctttcggttatggataaagcactttttgtagttttttttcactatttacataacaaattcaaatgaccatcacaaaaatctataagttatgttgctaacttacaaaaaagagccttacagattgcccacttagtgcgcttgatcccagttttcaccgctaccgacttccaccaataacggcaccgccagcgtagtactgttttccatcagctcatgcaccttcttcgatacgctatccagatcgtctttgtgcacttcaaacaccagttcatcgtgcacctgcatgatcatccgcacgcgcggtttttcactcagcagccagtcatcaacggcaatcatcgcccgcttaataatatccgccgccgttccctgcatcggtgcgttgatagccgctcgttccgcgcccgcgcggcgggcgccattgctggatttgatatccggcagatacagacgacgcccttccagcgtttcaacatagccctgctctttcgcctgcgcgcgggtacgttccatgtagtccagtacgcccggatagcgctcgaaatagagatccatgtacttctgcgcttctttacgcgggatattcagctgacgcgccagaccaaatgcgctcataccgtaaatcaggccgaagttaatcgccttcgcgctgcggcgctgttcattactgacgctttctaacggtaagccaaatacctctgccgcggtggcgcggtgaatatccttaccttccgcaaacgccttcagcagcccctcatcgcgcgacaggtgcgccatgatgcgcagctcaatctgcgaatagtcggcagacacaatcagatagtcctgaggcgcaataaacgcctgacgaatacgacgaccttcgtcattacgtaccggaatattctgcaggttaggatcggtcgaagagagacgcccggtcgccgtcaccgcctgatgatacgaagtatgaacacgaccggttttcgggttaatcatcagcggcagcttatcggtataggtcgatttaagcttcgccagcccacggtactcgaggatcaccttcggcagcgggtaatccagcgccagttcctccagcacctcttcagaagtcgacggcgcaccgccaggcgttttcttcagcggcttgatgccctgcttttcaaacaagatggtttgcaactgtttggtagaagagaggttgaactcctcaccggcaatttcatgggcgcgttgttccagttcaaccagacgcttagcgatctcctgagaatgcgcgtgaagcaccgccggatcgattttcacgccgttgcgctcaacccgcgacaggaccggcaccagcggcatctcaatatttttaaagatattcagcgggccttcatgctgctgcagttgcggccacatcttcagatgcagttgcagcgtcacgtcagcatcctccgcggcgtaacgcccggcctcttccagcgcgatctgattaaaggtgagctgatttttccccttaccggcaatctcttcaaaggtgatggttttgtgtttcaaccagcgatcggacaggctatccatatcatgtcggcccgcgacgctgtcgagggtataggattccagcatggtgtcgaaggcaataccacgcagttcaatgtcgtagttggccaggatgccgcgatcgtacttcaggttttgccctacttttagcaccttgtcatcttccaacagcggcttgagcagttccagcacgcgttcacgtgggatctggtccggcgcgtcgagataatcatgggccaccggcacataagccgcgacgccaggctcaatcgcgaatgacagacccaccatattggcggaaatgttatcgaggctatccgtttcggtatcaaaagcgaatagcggcgctttcttcaatctggcaatccattcgaccaacgtcgcttcatccaggattgtcacataatgctcagaagagagcgtcgcggcgacctcttcttccataatcaccgtggcttcagctggtttcgccgctggtttagcgcctttcccctgtagccatttgccggattcgacatcggtgatccaacgcttgaattcatattgtttaaacaacgccagcagctcatctgccgccggctgcgcaactaatagctcttcgcaaccgagatccagttcaacatcggtttttatcgtcgcgagttgataagagaggtaggccacctctttgttctgctccagcttcgccgccatcgttttcgcgccgcggaaggtcagcccggcgattttttccggttccgcatagagcgcatccagaccacccaaaccctgcagtagcgcctgcgccgttttttccccaacgcccgggacgccaggtatgttatccgaggagtcacccatcagcgcgaggaaatcaataatcagttccggcggtacgccgtacttattcacgacctcttccgggccgaggatagtgttggtcatagtattgattaaggtaatgcccggcgtcaccagttgcgccatatctttatcaccggtgctgatcagtaccgggcggcccactttttccgcctcgcgggccagcgtgccgataacgtcatccgcttcaacgccaggcaccgccatcagcggcagccccatcgccttcaccatcttgtgcagcggttcaatctgcgcacgtagatcgtccggcatcggcggacgatgtgatttgtaatgctcaaacaattcgtcacggaaggttttccctttggcatcaaataccacgacggcatgcgtcggctgatactgtaggatcaggctacgcaacatattcagcacgccgtacatagcgccggtaggctcccctgcgctattggttagcggtgggaaggcgtggtatgcccggtataggtaagaggagccgtcaacgagaatgagagggttttctgggatctgaaccataatttccgtgcctgtttatcagattatgggtaaaggatgccacagacgggcatgaaatcctgaatttttcccgcatttagccgaaaagattcatcgcagaggtgaatcactgcacaatattatctgtggataactttgtgtatagttttatcgcctcagccaaaaaagcctaaaccatgtaacaaggaatcttataagtcattatatatcaatgcattaaatatgcgcccaaggctatatacgcttaatgatgactcaatgttccatgtggatataagattcgcgtttttttctgttctggtaagacccgttatttaccgcgttttctggtaaaatcagcctcttgcgcggcttaagaaggttctttgccggcctaactttctgaataaactaactatgtcgagattactcgctgcgataacgctcccgctgagtatcgcccttaccatcttagtcaccattatctgttccgtaccgattatcatcgccggactgattaaactgctggtacctatcccggcggtatggcgttctatttccgttttttgcaattttatgatgtattgctggtgcgaaggactggcgctgttgctgcatctcaacccatggttgaaatgggatattcaggggctggaagggctgaataaaaagaactggtatctgcttatcagcaaccatcacagctgggcggacatcgtggtgctctgcgttctgtttcgcaagcatatcccgatgaataaatacttcctcaagcagcagttggcctgggtaccgtttatcggcctggcctgctgggcgcttgatatgccttttatgcgccgctattcgcgcggctacttactgcgccatccggaacgtcgcggtaaagacgtcgaaacgactcgccgctcatgtgaaaaattccgctctcatccgacaaccatcgtcaatttcgtcgaaggctcaaggtttaccgctgaaaagaagcgcgagacgcgctcgccttaccacaacctattgccgcctaaagctgcgggcattgcgatggcgttaaacgtcctcggcgcacagttcgataagctactgaacgttacactgtgctatccggacaataatgccagaccgttttacgatatgttaagcggccgcctgacgcgcatcgtggtacgtattaatctggtgccgattggcgaggaactacacggtgattacgtcaatgataaaaactttaagcgcggtttccagcgctggctgaatgggctttgggaagaaaaagatcgtcagctcactgacattatgcagggtaacgaaaagtcgtgactatagagtcgataaaaaaagccggtcagtgaccggcttttttttatttcttttcaaccagttgtttcacagtatctgcgtactgggaaacaaacgcgtccatattgctggtatccataccctgcgggttcagctggtatttaccattaacaaacatcgccggaacgccctgcagctgtaaatcggctgcggctttctcttgctgggcgaccagagacttcaccacaaagctgttccatgccgcgtcgtaatcttcacctttaacgcccgcatcaacgaagactttacggatgtcggcagtagactgcacggtttgggttttctgtaccgcttcaaacatcggcgcggtaactttatcttcaacgcccagcgcgatcgccacagcccacgcctgggtcaggtctttacccaacgggcccaggaattcaacgtgatacttggtcattttggtgccttcaggcagtttctgacgtacattgtcggaaacgtgcagcacttcttcaaactgatagcagtgcgggcagtagaatgagaagaactcaaggacctgaggttcacctgcaaccggcttatcaagggtggtgtactgcttgccgtcggtgatctgggcagcggatgcactgaaagccagaatcataccagccagcgccagccaaatttttttcatgattatttctctcctgatatatcacattaatacattggcgttaactgaagagggggttcctgcagaaccttcacctgctcaagaaatgttgcagtctgcccgcgccaataatcttccccggttaaccatgggaaatttatagggaaagcaggatcgtcccaacgcctgagcagccacgccagataataaactaaacgcatggcgcgtaaaggttcgatgagagcgatttcgtccgtgttgaacggactgaattcttcataagcctcaatgatggtctccagctgcatgcgctgttcggctttatcgccattcagcagcatccagagatcctgtaccgccgggccgctgcgggcatcatctaaatcaacaaacagcggaccatcgcgccacaggatattaccggcgtggcagtcgccatgtagacgaagcgtatccacacgcccgtgccactgcgccctgacggcatcgatgagtttatcagccgcacccaggaaatcagccttcaggccagatggaataagcgtcgcctgttcgaatacctgacgtggttccaacagatattcttgtacgccaatctccgggcgcgcattaaaacgctgcttacgaccggtctggtgcaggcggccaagatagcgcccgacccattctatttggtcaagattatctgcttcaaactggcggccaccgaggcttgggaagacggcaaagaagaatccttgatgttgatgtagcgtgctgtcgttaaataagagcggcgcggcaacgggcacttcatcttctacgagttgaagcgcaaactggtgttcttcgaggatctgttctgcggaccagcgttcaggacgatagaacttcaccacatagcggcggcgctcttcgtcctgaaactggtaaacacggttctcatagctattaagcggggtcagaccggagtcgacccgcattcccagatcgaataatccatcaatgatggtatccgggtgaagcgtctgaaaagtaaaagccttatcgtgcatcctgacatccgataatcgtacgaatgcttcaggatatcatctcgtagccggtttcgcggcagcacttacaaccttttactctttaataacaccgcgcgcgcgtaacagtgcggttttaaaatcctcttcataatctttctgaatacccgggatgacagcctctttcgatgaatcacgcatcttcaggtgataaatcagaatatcatcagaaagatcggctagttcacctttgtaacctgcttcagccgccagtttctgcaagaattgcatcaggttcagttcaggttctttttgccaggctggctggagaagctcaattacttcattcagacgtttacatttcatagtcatgctccttactcttgatagggacaagttaacagggtcaatcccacaatgaaagaggcgatattaatatgcgaaacgaggcaataaccggcgtcgtattggcgggcggaagagccacgcgcatgggcggtgttgataagggattgcagttgctaaatggtcgtcctctctggcgtcacgttgcggattcattagagccgcaggtaggcaggttagtaattagcgctaatcgtaatcttgagtattggcataccagcggatatgccgtttatcgcgatacccaagctgattttccaggcccactggccggaatgcttgccgttatgcagcaggtagatagcccatggtttgtattttgcccctgcgacacgccgttcatcccctcttttctggttgagcgcttcctgcaacagaaagcttcagcaccggtggtttgggtacacgatggcgagcgcgatcatcccgccgttgcattagttcatcgtcaaatcattccggaactggagacttatcttgctcatggagaacgccgggtgatggtctttatgcgtcaaataggtgggcgcccggtgaatttcagcgatgtgaaatcagcgttcatcaatgtaaatacgttggatgatttgcagcagatgcaggagccatcatgatcccattactggcgatcgccgcatggagcggtaccgggaaaacgacattattaaaacgccttatccctgaactctgcgccaatggattgcgtccggggctaataaagcatactcatcacaatatggacgtcgataaacctggcaaggatagttatgagttgcgcaaagctggcgcttcacaaaccattgtcgccagtaagcagcgttgggcgctgatgacagaaaccccagatgaagccgaattagatcttcaatggctggtaagcagaatggatccggacaaattggatttcgttttggtggagggttttaagcatgaacctgtgccgaagatccttcttttccggcaaaacagcggacatcgtgtagaagagttagtgattgatgaacatacgatcgccgtggccagcgatgtgcccatcgcgacgtcacttccgctgttggagttaaataatattccacagatcgcgacgtttattgcgagttggttagagaggcaatagcggtgatataggtgagatttccccggaggcggcgcaggccggggaacgatcggtagtcccggtaagcgcagcgccaccgggggtgccatcgtgtctggccacaaaacgcaaaaacaaaaggcccagtcttccgactgagcctttcgttttatttgatgcctggcagttccctactctcacatgggagaccccacactaccatcggcgctacggcgtttcacttctgagttcggcatggggtcaggtgggaccaccgcgctatcgccgccaggcaaattctgttttcaacacgtcctcaggacgcatcgattaatctgtatcaggctgaaaatcgtctcaaatccgccaaaacagcttcggcgttgtaaggttaagcctcacggttcattagtatcggttagctcaacgtatcgctacgcttacacacccgacctatcaacgtcatcgtctttaacgttccttcaggactctcaaggagtcagggagaactcatctcgggcaagtttcgtgcttagatgctttcagcacttatctcttccgcatttagctaccgggcaatgccattggcatgacnnnnnnnnnnnnnnnnnnnnnnnnnnnnnnnnnnnnnnnnnnnnnnnnnnnccccctcaattctccagcgcccacggcagatagggaccgaactgtctcacgacgttctaaacccagctcgcgtaccactttaaatggcgaacagccatacccttgggacctacttcagccccaggatgtgatgagccgacatcgaggtgccaaacaccgccgtcgatatgaactcttgggcggtatcagcctgttatccccggagtaccttttatccgttgagcgatggcccttccattcagaaccaccggatcactatgacctgctttcgcacctgctcgcgccgtcacgctcgcagtcaagctagcttatgccattgcactaacctcctgatgtccgaccaggattagctaaccttcgtgctcctccgttactctttgggaggagaccgccccagtcaaactacccaccagacactgtccgcaaccccggtcaggggccaacgttagaacatcaaacattaaagggtggtatttcaaggttggctccacgcagactggcgtccacgcttcaaagcctcccacctatcctacacatcaaggctcaatgttcagtgtcaagctatagtaaaggttcacggggtctttccgtcttgccgcgggtacactgcatcttcacagcgagttcaatttcactgagtctcgggtggagacagcctggccatcattacgccattcgtgcaggtcggaacttacccgacaaggaatttcgctaccttaggaccgttatagttacggccgccgtttaccggggcttcgatcaagagcttctccttacggataaccccatcaattaaccttccggcaccgggcaggcgtcacaccgtatacgtccactttcgtgtttgcacagtgctgtgtttttaataaacagttgcagccagctggtatcttcgactgatttcagctccatccgcagggacttcacctacatatcagcgtgccttctcccgaagttacggcaccattttgcctagttccttcacccgagttctctcaagcgccttggtattctctacctgaccacctgtgtcggtttggggtacgatttaatgttacctgatgcttagaggcttttcctggaagcagggcatttgttacttcagcaccgtagtgcctcgtcatcacacctcagcgttaaaaaggtaccggatttacctggaacctccgcctacatgcttaaaccgggacaaccgtcgcccggctaacatagccttctccgtcccccttcgcagtaacaccaagtacaggaatattaacctgtttcccatcgactacgcctttcggcctcgccttaggggtcgactcaccctgccccgattaacgttggacaggaacccttggtcttccggcgtgcgggcttttcacccgcattatcgttacttatgtcagcattcgcacttctgatacctccagcaaccctcacaggccaccttcgcaggcttacagaacgctcccctacccaacaacacatagtgtcgctgccgcagcttcggtgcacagtttagccccgttacatcttccgcgcaggccgactcgaccagtgagctattacgctttctttaaatgatggctgcttctaagccaacatcctggctgtctgtgccttcccacatcgtttcccacttaactgtgactttgggaccttagctggcggtctgggttgtttccctcttcacgacggacgttagcacccgccgtgtgtctcccgtgataacattcttcggtattcgtagtttgcatcgggttggtaagtcgggatgaccccctagccgaaacagtgctctaccccgaagatgagttcacgaggcgctacctaaatagctttcggggagaaccagctatctcccggtttgattggcctttcaccccagccacaagtcatccgctaatttttcaacattagtcggttcggtcctccagttagtgttacccaaccttcaacctgcccatggctagatcaccgggtttcgggtctataccctgcaacttaacgcccagttaagactcggtttccctgcggctcccctatacggttaaccttgctacagaatataagtcgctgacccattatacaaaaggtacgcagtcacaccctaaagggtgctcccactgcttgtacgtacacggtttcaggttctttttcactcccctcgccggggttcttttcgcctttccctcacggtactggttcactatcggtcagtcaggagtatttagccttggaggatggtcccccatattcagacaggataccacgtgtcccgccctactcttcgagttcacaacctgtgcattttggtgtacgggactatcaccctgtaccgtcggactttccagaccgttccactaacacacaagctgattcagactctgggctgctccccgttcgctcgccgctactgggggaatctcggttgatttcttttcctcggggtacttagatgtttcagttccccggttcgcctcgttaacctatgtattcagttaacgatagtgcaacgaattgcactgggtttccccattcggacatcgccggctgtaacggttcatatcaccttaccgacgcttttcgcagattagcacgtccttcatcgcctctgactgccagggcatccaccgtgtacgcttagtcgcttaacctcacaacccgaagatgtttcgtaaaacattttcgtgtcgcgaaaatttgagagactcgaacacacattaactgtgtgtcgtttcaattttcagcttgatccagatttttaaagagcaaatatctcaaacatcacccgaagatgagttttgagatatatcggcacgcgtctttcactcacgaaccagcaagtggcgtcccctaggggattcgaacccctgttaccgccgtgaaagggcggtgtcctgggcctctagacgaaggggacactgaagtctcaatcgcaagacgccttgcttctttactttcatcagacaatctgtgtgagcactacaaaggcaggttctttaaggtaaggaggtgatccaaccgcaggttccctacggttaccttgttacgacttcaccccagtcatgaatcacaaagtggtaagcgccctcccgaaggttaagctacctacttcttttgcaacccactcccatggtgtgacgggcggtgtgtacaaggcccgggaacgtattcaccgtagcattctgatctacgattactagcgattccgacttcatggagtcgagttgcagactccaatccggactacgacatactttatgaggtccgcttgctctcgcgaggtcgcttctctttgtatatgccattgtagcacgtgtgtagccctactcgtaagggccatgatgacttgacgtcatccccaccttcctccagtttatcactggcagtctcctttgagttcccggcctaaccgctggcaacaaaggataagggttgcgctcgttgcgggacttaacccaacatttcacaacacgagctgacgacagccatgcagcacctgtctcagagttcccgaaggcaccaaagcatctctgctaagttctctggatgtcaagagtaggtaaggttcttcgcgttgcatcgaattaaaccacatgctccaccgcttgtgcgggccccgtcaattcatttgagttttaaccttgcggccgtactccccaggcggtcgacttaacgcgttagctccggaagccacgcctcaagggcacaacctccaagtcgacatcgtttacggcgtggactaccagggtatctaatcctgtttgctccccacgctttcgcacctgagcgtcagtnnnnnnnnnnnnnnnnnnnnnnnnnnnnnnnnnnnnnnnnnnnnnnnnnnnnnnnnnnnnnnnnnnnnnnnnnnnnccccctctacaagactctagcctgccagtttcgaatgcagttcccaggttgagcccggggatttcacatccgacttgacagaccgcctgcgtgcgctttacgcccagtaattccgattaacgcttgcaccctccgtattaccgcggctgctggcacggagttagccggtgcttcttctgcgagtaacgtcaatcaccaaggttattaaccttaatgccttcctcctcgctgaaagtactttacaacccgaaggccttcttcatacacgcggcatggctgcatcaggcttgcgcccattgtgcaatattccccactgctgcctcccgtaggagtctggaccgtgtctcagttccagtgtggctggtcatcctctcagaccagctagggatcgtcgcctaggtgagccattaccccacctactagctaatcccatctgggcacatctgatggcatgaggcccgaaggtcccccactttggtcttgcgacgttatgcggtattagctaccgtttccagtagttatcccctccatcaggcagtttcccagacattactcacccgtccgccgctcgtcacccgagagcaagctctctgtgctaccgctcgacttgcatgtgttaggcctgccgccagcgttcaatctgagccatgatcaaactcttcaatttaagtttgatgctcgtgaattaaacttcgtaatgaattacgtatgttcactcagagacttggtattcatttattgtccgaagacattaagaatccatgtcactttgagtgcccacacagattgtctgataaattgttaaagagcagtgccgcttcgtttttcgctgcggcgcgggtgtgcatattacgctttcccgcctcagagtcaagcatttatttttgcttttctccgcgaggttctcaccggaaccccgctgacccggcggcttgtttgccgttgttccgtgtcagtggtggcgcattatagggagtaattctgaagtgacaagaggaaattcaaaaaaactttttgttcgctcgattttccaccataacgcaagttttacgcgctatttgctcgtcatttgcgcgatttctcgggcaaatctggcaacctgcggccaatcggtataaaccacttctttactggtatccgtttccccgccggtcatcttcataattaagcgaatcatcattcgatcgtaccagcgatagcgcggataacgcagcgcaccggcaaataccgcgcaactctgcggctgccacggcgagttaaggagaaacttgcgcgtatagctgttggtttgcggcgtccgcttttcaggtttgcgcgccaccaggtttaccgagaagaacgctcccggcaacgcctgcagtgatgccagatgttttttcacgaagcggtccagcgctggatgaaagtgcccatagcgaatagaagcgccaatcaccacccgatcgtaatgatgccactcaaccgtctcggtacggttcaggttcacagtatccgcatcaacccccagctctttgagttcagaggccagataggaggcaatttcacgggtctgcccatcccgggtggagaaaagaattaaagttttcacgagcactcctgttaatcgcgccagaaagtgggagtaaagagcaccaataaggtgaacacttccagacgaccaaacagcatgttagcaatcaggatccatttcgcgaccgggttcattgtcgcaaagttatcagcaacgaccccaagaccaggccccaggttgttcaatgtcgccacaactgaagcaaaggcagagaagtcatcaaccccagtcgcaataatagccagcatactaatgataaagaccagcgcataggcggagaagaatccccacacggcttccagaatgcgttccggtagcgcgcggttgcctaacttaatgctatagaccgcattcgggtgcaccagacgcttaagctcacgattcccctgcttaaacagcaacaggatacgaatgacctttaaaccaccgcccgttgacccggcgcagccgccgatgaaggccgaacagagcagcagcacgggcaggaacagcggccaacgcgcaatactgtcggtggtaaacccagcggtcgtcgccatcgacaccacctggaagaacgcctggttcaacgttgttagcaccgagccatagacattatgtagccacaataccaacgtacagacgataaccagcgttagctgaacaccgataaacattctgaattccggatcgcgccagtaaacccgcaaactgcgcccacttaataacgaaaagtgcaggccatagttacagccggagatcagcaggaagatggcgataatggagttaatcatcgggctattaaagtagccgacgctggcatcgtgagttgagaagccgccgatagcgatggtcgcaaagctatggccaatcgcatcaaatgccggcatcccggcaaaccatagcgccaatgcgcaggcgacggttaataagacataaataagccacagcgtttttgccgtctcggcgatacgcggacgcatcttgttgtctttcaacgggcctggcatttctgcccgatagagctgcatcccaccgacgccgagaataggcaaaatcgccaccgccagcacgatgatccccataccgccgaaccactgcagcatctggcgatagaacaggatggcatgaggcagtgagtccagccccaccagcgtcgtcgcgccggtagtagttaagccggagaaggattcaaaaaaggcatccgtcaccgtgagattaggctgttcagcaaagataaatggtaacgcaccgacgctgcccaacaccgtccagaacagcacgacaatcagaaacccttctcgggatttcagttcgcctttttgcttgcggttcggccaccacagcatggagccaatcgccagggcaacaaagaaggtttgggtgaaagctcgccccgcgccatcgcgatatatcaaggccactaatcccgggacaatcattgtccccgaaaataagatgaccaacagtccaacgattcgggttatcgcgcgaaaatgcatctctggcgcttcctttgggttacaaaaaaatcaggtggggattattcgtcaatcttcagtaattgcaatgaaccacgactaaaatcagccagttttgtcgaaaaagtggccacttcagcttgcggaagcgcgacgcgcagttgcacagacgcctgatattcgctttccacaataatacccgagaactgcgccagcaacgcttctaccccggccagctgtccgtattcacattgcaaagtatatgcggttaacggcgtcttgcgctgcgttttcaactgcgcaagcgcctgatggactccgccgccataggccttcaccaggccgccggtacccagcagaataccaccgtagtagcgcaccaccaccgcggttatctcgccgacgccgctgcccatcagctgcgccagcatgggtttacctgccgttcctgccggttcgccatcgtcagagaagcccaactgctgtgaatcatcaggaggcccggcaacccacgccacgcagtggtgacgtgcgtccgggtgctcagccctgaccgattcgacaaacgctttcgccgccgccacgccgtcggtatgcgccagcagcgtgatgaaacggctctttttgatctcttcaacaacgctcaccggcgcggccggcaccaaccaactttccattacgccagtttcaggtcgcgcgtcatattttcgatgctgttttcgtgaaccaccacgttatcttcaatacgaatcccgccaaacggcttcatggcttcaattttctgccagttgaagtgcttgctgaactgcccttcacgccatggcgccaatagcgactcaataaagtagatgcctggttcgattgtcaacaccatacgcggttcgagagtacgggtgcagcgcaggtaaggatacttcgacggcgccgccagatgcgtaccggtatcgtcttgcatgaaacctgcgacatcatgaacctgcaggcccagcgggtgaccaatcccgtgtggcataaacggcccggtcagatcgttttccaccatcgcctcttcgctcatgccggtcactagctggtgtttacgcagtagctttgcgatgcgctgatggaactgaatatggtaatcaacgtagctggtgccagccttcatggtgctaataagcgccagttgctcgtcgttaacgtctttaatcagctgcgcgaaatcattatcgctgtgccctgcccaggtacgagtcaggtccgcggcatagccgttgtactctgcgcccgcatccaacaagaagctacgcatttcggttggcgcacggtgatccagcttggtgtagtgcaatacggccgcatgctcattcagcgccacgatattgctgtaagggacgtcggtatcgcgatgaccggtcgccgtcaggtaagcctgattaatatcgaactcgctcatccccgactggaaagcttcgtgggccgcgcgatggccgttgaccgccgatttctgcgcttcacgcatacaagccagctcatagtcggttttgtaagcgcgataataatgcagatagtcgataacgcctttcgggttgattttgtctgccgcgatctccagaccgatagcacgctccggcaccgggccgatatacgcaatattgccacgcgccgcgggcagttgaccgccaatgccgtcggcttttggcaacgcaatcacctccacttcttcggtccagaaagaggtcggcagcggctcaacgttgtgccagtaatcgaccggcagatagaaccacagtttcggtttattcacgccatccaccagcagccagcagtttggcacctgggtcaccggcacccacgccttaaactgcgggttaaccttaaacggatactgatgatcgtcgaggaagacattgatcagctcgccggagtgaatcagcagagcatccagcttgaagcggtccaatactttgcgggtacgttcttgtagggtaacgatatgatttttataaagcgcggccagtgattccatcttttatcctttgcttttattggagcgtgattctccgcatcttagcacattggctccaggccgggtgatttctaccggatgtgatccgaccagcaattatttaaagagtaatttgcattttcttaacataaattccacactccgagtcatctggtatgaccagatcatattgctggattcaggagactgacatgctctacaaaggcgacaccctgtacctcgactggctggaagatggcattgccgaactggttttcgacgccccggctcggttaacaagcttgatactgcaaccgttgccagcctcggccacgcgctggacgtactcgaaaaacaaaaagatctcaaagggctgctgctgcgctctgaaaaagcggcctttatcgtcggcgccgatatcaccgaattcctttcactattcctggtgccggaagaacagttgagccagtggctgcacttcgccaacagcgtcttcaatcgtctggaagatttaccggtccctactctgtcagcggttaacggctacgcgctgggcggcggctgcgaatgtgtactggcgaccgactatcgcctcgccacgccggatctgcgcatcggcctgccggaaaccaagttgggcattatgcctggcttcggcggttccgtacgtctgccgcgcctgctcggcgccgatagcgcgctggaaattattgccgccggtaaagacgtcggtgccgatcaagcgctgaaaattggcctcattgacggcattgttgccgcggaaaaactgcatgacggcgcgctggcgattctgcgccaggcgattaatggcgacctggactggaaagccaaacgtcagccgaaactggagccgctgaagctcagcaaaattgaagccgccatgagcttcactattgccaaaggtatggtcgcgcaaaccgccggaaaacattacccggcgccgatcaccgcggtaaaaaccatcgaagccgccgcgcgtcttagccgtgatgacgcgctgaagctggaaaaccaaagttttgttccgctggcgcacactaacgaagcgcgcgcgctggtcggtatcttccttaacgaccaatacgtcaaagcgaaagcgaaaaagctgaccaaagatgtcgagacgccgaagcacgctgccgtattaggcgccggcattatgggtggcggcattgcttaccagtcagcctggaaaggcgtgccggtggtgatgaaagacattagcgacaaatcgctgactcttggtatgaccgaagcggcgaagctgctgaataaacagctggaacgcggaaaaatcgacggtctgaagctggccggagtgattagcaccattcaaccgacgctggaatacagcggttttgaccgcgtggacgtcgtcgttgaagcggtggtggaaaacccgaaagtgaagaaagcggtactggcggaaaccgaagagaaagtgcgtccggacaccgtgctggcttccaacacctcaacgattcctatcagcgagctggccagcgttctgcagcgcccggagaatttctgcggtatgcacttctttaacccggtacatcgcatgccgctggttgaagtgatccgcggcgagaaaacttcggacaagaccattgccaaagtcgtggcctgggccagcaaaatgggcaaaacgccgatcgtggtgaatgattgccccggcttcttcgttaaccgtgtactgttcccctatttcgcaggcttcagccagctgctgcgcgacggcgcggatttccgcaaagtcgacaaagtgatggaaaaacagtttggctggccgatgggcccggcctatctgctggatgttgtcggcatcgataccgcgcaccatgcccaggcggttatggcggcggggttcccacagcggatgcaaaaagattatcgcgatgctatcgacgcgctgtttgacgccaaccgtttcggccagaagaacggcctcggtttctggcgttataaagaagacagtaaaggcaaaccgaaaaaagaagaagatgccgcggtcgatggtctgttggccgaagtcagccagccgaagcgcgatttcagcgatgaagagattatcgcccgtatgatgatcccgatggttaacgaagttgttcgctgcctggaagaaggcattatcgccagcccggcggaagcggacatggcgctggtatacggcctgggcttccctccgttccacggcggtgcattccgctggctggacaccatcggcagcgcaaaatatctcgatatggcgcagcaataccagcacctcggcccgctttatgccgtgccagaaggtctgcgtaacaaggcccgtcataacgaggcgtattatcctccagtagaaccagcccgtccggttggcgaactgaaaacggcttaaggagtcacaatggaacaggttgtcattgtcgatgcaattcgcaccccgatgggccgttcaaagggcggcgcctttcgcaacgtgcgtgcggaagacctctccgcacacctgatgcgaagcctactctcgcgtaacccgtcccttgaggcgagcgcgattgacgatatttactggggctgcgtgcaacaaacgctggagcagggtttcaacattgcgcgtaacgccgcgctgttggcggaaataccgcactcggtaccggcgacaacggttaaccgcctgtgcggttcctccatgcaggcgctgcacgatgccgcccgtatgatcatgaccggcgacgccagcgtctgcctgattggcggcgttgagcacatgggccatgtgccaatgagccacggtgtcgatttccacccgggccttagccgtaacgtggcaaaagccgccggtatgatggggctgaccgcggaaatgctggcgcgtctccacggcattagccgtgaaatgcaagatcaattcgccgcacgctcccacgctcgcgcctgggcggcgacgcaatccggggcattcaaggcggagattatcccgaccggcggccacgatgccgacggcgtgctgaaatcctttaattatgacgaagtcatccgcccggaaaccaccgtcgaagcgctggcggcgctgagaccggctttcgatccggtgaccggcacggtaacggcaggcacctcttccgcgctttccgacggcgcggcggcgatgctgctgatgagcgaaagccgcgcccgcgagctgggtctgaagccgcgcgctcgcgtccgttcaatggcggtggtcggctgcgatccgtccattatgggttatggcccggttccggcctcaaagctggcgctgaaaaaagcgggattatccaccagcgatatcgacgtctttgaaatgaatgaagcgtttgccgcgcagatcctgccgtgtattaaagatctgggcttaatggagcagatcgacgagaagatcaacctcaacggcggcgcgatcgcgctcggacatccgctaggctgttccggagcgcgtattagcaccacgctgattaaccagatggaacgcaaagacgcgcaattcggtctggcgaccatgtgcatcggcttaggccaggggatcgccaccgtattcgagcggatgtaggaaagaactcgatgccattattgcctgccagccaacaggcaataatggattagagggggtttagttgccgttcttcccgcctgtcaggggcgggttttttattttcagataaacgcaaacgcatcgccaaacaggcggtcttcacgcgcgccgcgctcgttacagaacaggtcgcgggcaattttggccatctcaaaacgaccggcaatgtaaatatcatgctccgccagcgtaccgtaatcctgcagcaccgcagtcagtaccgtaccggaacggccgcgccacccttcttccggctgctcgaccaccggctcgatgcgcagattcggatgcttgatgcttaacgcttccagctcggccagatcgtacagatgcttagcctcgcggccgcccaataaatggcgatatcgcgattcgggttacgcgccagcgcggttaacagaatagaacgcacataagagaatccggtaccgccggcgatcagaatcagcgggcgatcttcgtcatcgcgcagccacgcttcgccatgcggaatatcaacctcaatttcacgctctttcagaatgcgatccatcaccgccatcgcatacagattgagttcagaagcaccgatatgcagctcgataaactcgtgctctgacggcgtggaagccatagagaacggacgtttgtcgcgctcgtccatcaccaccatcagatactggccggcgcggaaagaaaatgccgcttccggtactaatcgaacgcgatacacggtatcggtaatcgcctccaccgaggtcactttacagcttaaggttgtcatgcgtcccctctgtcgggtctatagagcaaaacagcggcgttagccccgcttactgttatttaaagatggccagttcatcccagatggcgtcgatgcgcgccgtcacctcaggatcttttttgattggacgaccccattcacgctgggtttcgccaggccatttatttgtggcatccagcccatttttgaacccaggccggaaaccggcgaggcaaaatccaaataatctattggcgtattttctaccagtaccgtatcacgagccgggtccatacgggtagtaatcgcccaaatcacgtcgttccaatcgcgcgcgttcacgtcatcgtcgcaaacaatcacgaacttggtatacatgaactggcgcaggaacgaccagacgcccatcatcacgcgcttggcatggcctgcgtactgttttttcatggtgaccaccgccaggcgataggaacacccttccggcggtagatagaagtcgacgatttccgggaactgcttttgcagaatcggcacaaaaacttcgttcagcgccacgcccagcaccgcgggttcatccggcggacggccggtataggtcgaatgataaatcgcgtcttcgcgctgggtaatatgggtcaccgtaaataccgggaagctatctacttcattgtagtagccggtatgatcgccgtatggcccttccggcgccatctcgccggcctcaatatagccttcaagcacgatttccgcgctggccggcacttcaaggtcattggaaacgcatttaaccacttcggtcttggtgccgcgcagcaggcccgcgaatgcatattccgacagggtatcgggcaccggcgtcaccgcgcccagaatggtcgccggatcggcgccaagcgccacggaaaccggaaagcgctcgccgggatgcgccgcgcaccactcctggaaatccagggcgccgccgcggtgggacaaccaacgcatgatgagtttatttttgccgatcagctgctggcgataaatacccagattttgccgttccttgtgcgggccgcgagtcaccgtcagccccaggtaatcagcggcgcggcatcttccggccagcaggtcataatcggtattttgttgagatcgacatcatcgccctggatgattttttgctgacaaggcgcgccgcgcaggcgtttggtcggcatattcaacacctgcttgaactgcggcagcttatcaaacagatcgcggaagccttttggcggttccggctctttcagaaaggccaatagtttcccgacttcccgtagcgaactgacgtcttcctggcccatccctagcgccacacgacgcggcgtgccaaacaggttgcacagcaccggcatcgagtagcctttcgggttttcaaacaacagcgccgggccgccggcacgcagggtgcggtcggcaatttcggtaatttccagatgcgggtcgaccggcagggtaatccgttttagctcgccctgctgctcaagtaatgtcagaaagtcgcgtagatcgtggtatttcatggagttattattgacctctatacaagcggctgattatacgattttcgccgcaacgatgctgtacttttgttaaataagcgtaaatgaacaggctatttacgctttcgcttataatggttttcgcgattgttccaggcttttgttatgcttgcaggtagtaaagcggaaagagtcattatgcaagcctggtacttactttattgcaaacgtgggcagcttcagcgcgcccaggaacaccttgaacgtcaggcagtcaattgcctgatgccgacgatcgcgctggaaaaaatcatccgtggtaaacgcactacggttagcgagcccctgttcccaaactatctgttcgtcgaattcgatcccgagatcattcataccaccaccatcagcgctacccgaggggtgaacagtttcgtccgttttggcgcccaaccggcagtggtcccttcagaggtgattcaccagctttccatctataaaccggaaggtattaccgacccggaaacgcctcatgaaggcgacagcgtgttaatcaccgacggcgcttttgaagggctgcaggctattttcaccgagcccgacggcgaagcccgttcaatgctgctcctcaatctattgaataaacaggtcctgcaaagcgttaaaaataccgacttctataaaatctgacggcgcggttaaaagcgcacgccaaagagcttcctgacgttcgcatccgtaacctcctccagccattgcgcttcctcgcctcgccagcccgctacgcttgccagaatatgcggcagataagcgggctcgttgcgccgcgaggagggcttcggcttcatatccctcggtaatagatatggcgcatcggtctccagcagcagacgttccgccgggatcgccggcaacagttcacgaagctccagtccccgccgctcatcgcatacccaaccggtgataccgataaataaccctttatcaaggcactgaagcacttccgcgcggctaccggtaaagcagtgcaacacggcgcccggcagtttattgagccacggctccagcagctcaaggaaccgttgatgggcgtcgcggcagtgtaaaaataccggcattgagagctcggccgccagcgccagctgggcgctgaatgccttctcttgttcctgcggcgttgagaaattacggttgaaatcaagaccgcattcgccaatcgccgccacctgcggctggcgggccagcgcgtggatttcttcagccactgactccgtccaggtgctgctatcgtgcggatgtacacccgcggtagaccagcagttggcgtaacggccagccatctgctgcgcctgctggctttcatgcagattggtgccggtcagcaacatcccatggatacccgccgcctgcgcacgcgcaaccacctcgtcgtggtcgcgggaaaactgcgagctggtcagatttacgccaatatcaaacatcataactcccatatgacaaccgccctgacgggcggttggcgttgttactcttctttgctctccgcctcttcggcggcggcatcttcgtcacgcgtcaggcgtttaccggtgtagaaacgggcaaagaacaccccgacttcaaacaggcaatacatggggatggccaacagcgtttgcgagaacacatccggtggcgtcagcaacataccgaccacgaaggcgcccaccagcacgtagggacgttttttacgtaaatcttccggcgtcgtgacgcccatccagcagagcagaacgatggcgaccggcacttcaaacgacacgccgaaagccataaacagcgccatgacaaaatcgaggtagctacggatatcggtcgaaactaataccccttccggcgcggcgtgggtcaggaagccgaatgccagcggaaacacaacgaaataagcgaaagccatgccgatataaaacagcagcgtactggaaaccagcagcggcatgaccagccgacgttcatgcttatacagcgccggcgccacgaatgcccatacctgataaagaatgaccggcaccgacaggatcaccgagaccataaaggtcagtttgatcggcgtgaagaaaggagaagctacatcggtggcgatcatcgtcgcgcctaccggcattttgctgataagcggagcggaaaccagttgatagatatcgttggcaaagtaaaccaacgccaggaagatcaccaggatggcaatgatgctgttgagcaggcgcttacgcagctcaatcagatgtgaaattaacggttgagtctcgtctacgcccattttttacgctttatcactcgatgcgggggaagaatctggcactgccgcggcggctttttccttagccgccgggacttcagccggcgaaacagatggctcctcggcaacggactccggggtatgtgccggggcgctgacctgatgttccgccgttgccggtgtaacatcctggcgctgcgcttcgctacctttgacgaccggattatggatggtgttcgcttcgtcgctggccttttcaggatcgtgggcggtataggaacgcttcatagattcagctgcttcacgcagttcgtccatcgaggctttaagctccggagtcagattatccaggctggccttctccacctttttcaggctctcctgaaactcctgcagttttagctcctgggcaagctcattttgtacggtggtcgccagcgagcgcaacgtacggatccagctggccaccgttttgacggcgacaggtagtcgctgtggccccaatacgatgaggccaatcacgaacaccagcaatagttcactaaaaccgatatcgaacacgaattacacctgctctttgtcgtggcgttttgtctcgtcttttttcgcatcatcttgtttatcagcgatagttttcgctgcaaaatctgcatcggctgtggatttatcagatttttcgtcatcgctcatcgcttttttaaagcccttgatcgatgcgcctaaatccgaacccagcgagctcagcttcttcgtcccgaaaagcagaactacgatgacgacaacaattaacaactgccaaatactgataccacccatacacattcccctatgacagatgatgaatgatgagagcgcattatacacgtcatccggtgagacgcctctttgtcagaccgctcacatgacttcgcgcaagaatcaatgcgccagaataaacgcgaaacctgtcagcgcgtttttcgccaaccaataagccaggttacgacgccgccggccatcagccagcctggcatcatgccccactccgggcggtggataaataacagcgtaccgcttaaaagcaaaacggcgcctataccaaacagataacgggactgcccctggcgcacgtggcgcacctggaagtcgcgcacaatagtatcgacgctggtctgcagctgtttgctctgctgcaagctttggtacaccagctcaggaatttccggcatccgttcaatccagaacggcgctttttctttaaacgcacgcaccagcgcgggaataccgacctgatccttaatccacgactcgaggaaaggcttcgccgttttccacaagtctaactgaggatagagctgacgacctaccccttctacgtaaagtaatgtcttctgaagcaaaaccagctgcggctgtacttccatattgaaacgccgcgcggtattaaacagattcagcaacacgtggccgaaggagatttccgccagcggcttttcaaagatgggctcgcatacggtgcgaatcgcaaactcaaactcttcaacgttagtatccggtggtacccatccggaatcgacatgcagctcggcaaccttacgataatcgcggttgaagaaagcgataaagttttctgccagatagcgcttatcgtctttgttcagcgagccaacgataccgcagtcgataccgatatattgcgggtcatgcggatgatcgtagctaacgaaaatattacccggatgcatatccgcatggaaaaagctgtcgcggaacacctgggtaaagaagacctgcaccccacgctccgcgagcaactgcatgttagtaccctgcgcttccagcgcggcgacatcggaaaccggaataccgtagatccgctccatcaccatcatgccttcgctgcagtaatcggaatagacttccggcacgtatagcattgggctgtcttcgaaattgcgccgtagctgaatagcgttagccgactcgcgtaatagattcagctcgtccatcagcgttttttcatattcgcggacgacttcctgcggacgcaaacggcggccatctggcagcaggcgaggcacccagcgcgccaggcgataaattaacttcatgtccgctttgatcaccggcaggatatccgggcggatgaccttgatgacgacctctttgccgttgtctttcaggcgcgcggtatggacctgggcgatggaggcggaagcgagcggctcaatggcgaaatcatcgaaccaggcttcaatgggcagcccgcccatcgcttgttcgatctgttgtttagccaatttgccatcgaaaggcgcgacgcgatcctgcagcagcgccagttgatcggcgatttgcggcgggaacaggtcgcggcgggtggagagcatctggccgaacttaatccataccgggcccagctcctgcagcgccaggcgtaagcgttgacccagcggtttatctttgtggcgattcggcatccagaacaacattcgccgccagatgcgcagcggcaatgtgatacgcattttgggaatgagctcatcaagcccgtaactcaaaaaggtgcggatgataaaatacaggcgccgtaattctcctggcgtcatttgccctccagcgtttccagccgtttttccagtgcggccagcgcgcgttccacggcggcggattcttcagcaaaccaggccatttccaacggccccggcgccagtcgccactcttcggtaatcgcttcagcgacgtagcgctgctggcttttcgcgccctgcagcaggaagcgcgcgccgccgcgaagcaccttgccaaccccttcagcgacgatatcgccggtatacggcgccaatagctctgccgggtcgaactccgccagatcgcaaagtgcgaccatgttctgcacaacctgcaggtcgccctgtacttccagatcgccgctgcgaatcagcgcggtcagttgttggcggttacgcaactgcggcagcacgctcaggcgggttatcacggtacagtcagcttcgccttcccacgcgccgagcacgtcgatttgctgctcgctaaaggccagcacgacaggcgctgacagctctttgagctctacgcgcagcactttccccagcaggcgttgacgcgccggtttaagcgcgcggtcacgccagagaaaagtattaagaaccgtttcgatgccagcggtaaccagcggtgcgaaaggcatagcgtccctcctgtcagaacttatagccgcggtgtagcgcgacaatacctgccgtcaggttgtagtagtcgacgctttcaaaacccgcctcctgcatcatgcctttcagggtatcctgatcgggatgcatgcggatggattccgccagatagcgatagctttccgcatcgtttgccaccagctcgccgactttcggcaacacgtggaaggagtaagcgtcgtaggctttgctcagcggttcgagaatcggtttagaaaactccagaaccagcagacgtccgcccggtttcagcacgcggtacattgaacgcagcgctttgtctttatcggtaacgttacgcaggccaaaggagatggtgatgcagtcaaaggtgttatccgcaaacggcagcgcttcagcgttggcttgaacgtactcgacgttaccgacaataccgatgttgcgcagtttttcgcggcccattttgagcatcgaatcattgatatcggcgagcatcacgcggccggtttcgcccaccagacgggaaaacttcgccgtcaggtcgccggtaccgcccgctaagtccagcacggtttgcccgcgacgcacgccgctgcagtcgatggtgaagcgcttccacaagcgatgaatcccgaacgacattaagtcgttcatcacatcatattttgcagcgacagaatggaatacatgcgccaccatgtccgccttctgctctttggctaccgtttgaaagccaaaatgcgttgtttcttgtgaatcctcaaccatctctatgcccgcttacttatcaagaaaatgttcagcgagtgtaacagattcaggccatttcccatacgtttcagcttggcctgacgtgctcgtttgctctcgctgcagggtcggagtctgcgctaaacacatcttcctgcggtgaattttcatcttcctcaaggcggtattcgtcatcctgcgccgtggcctgctcgactaaatcaggattaatcccgcgcttaacctcgacccccaggccacggaatgactcggcctgcaccagcaggttgccgcgccccgaggcaagctttttcatcgcctggcgatagttatcctgcgctttatcaaggctttgaccgatagccgacatatcgtcgacaaacagccgcatcttgtcatacaggcgtccggcgcgctcggcgattttctgcgcattacggctttgatgctcatagcgccacaggttggcgatggtgcgcaacgccaccagcagggttgtcgggctaaccagcataatattgttcttcagcgcctcgctgataagctctggctgacggtcgatggccagcaggaacgccggctcgacggggataaacatcagcacatagtcgagcgaacgtagccccggcagttgttgatagtcctttcgccccagcaggcgaatgtggttacgtaccgaggcgatatgctcttgcaacgccgcttcgcgggtgtagtcgtcgtcagcgttgaaataacgctcataggcgaccagggtcattttggcgtcgataaccacatctttaccctgtggtaatcgcacgataacgtcaggctgcatccgcgagcggttatcggtttcaatactgacctgggtttgatactcgtagccttcgcgcaggccggaggcctccagcacgcgggttaacactacttctccccagttaccctgagttttattatcgcccttcagcgctttcgtcaggttcaacgcctcttgcgccatctgcgcgttcagctgttgcaggttgcggatttcgtgcgccagcgtgtggcgctcacgcgcctcctggccgaagctgtcctgcacctggcgacgaaagccgtcgagctgttcgcgcagtggcgtcagcaggccatgcaggctctgtcggttttgttcatcaacccgtcggttgctgtgttcgaatatgcggttcgccaggttttcaaactgctcgctcaggcgctgctcgctgttgaccatctggcggattttatcttcggcgtgtagctgtgtagattccagacgggtggtcacttcacgcaggtcggcctccagcgaggtgttaatatcacgcaggctgcgcagctcgttgttgagaagttcgcactcatcgcgccagtgcgattcctgcaccagctgctgacgtgcggcgctaagttcgatatccagctcgcggcgctcttcaatgagatcggcacggatttgatcggcacgagcttttgtcgccagccagccaacgattaaccctgccgccagcgccaccatggcgcttatcacaatagagatatccacaacgcctccccggcaaccacttacgacacaaaaatagaattgtgctgtacaaacgtccagttgaaaaggattttcctgcgaggcgctacgcaaaaaaagaaaggccggagggtccggccttgcgagaaaaagagaagaactacagcaggcggcgcgccgcttccacaacgattttcaccgcgtggctttcggtttgcttcatggtttcggcgttagggatctcttgctgggtacggttgacgataacccctgccaccattccggcacgcaggccctggctggcgcacatggtcagcagcgtagcggattccatttcatagttcatgacacccattgcctgccactcttccatcgagcctttgaaacggctcacgacgcggccggagaaggtgtcgtaacgctcctggcctggatagaaggtatcagaggaggcagtcacgccgatatgggtggtcgcaccgattgatttcgccgcttccaccagcgcggtggtacaggcgaagtcagcaacggccgggaactccatcggcgcgaagtgcaggctggcgccgtccagacggacagaaccggtcgtcactagtacatcgccaacgttgatatgcggctgaatcgcgccagtggtaccgatacgcaggaaggtacgaacccccagttgcgccagctcttccacggcgatagaggtcgacgggccgccgataccggtggagcaaacaatcaccggtttgccgtccagctcagcgcgccaggaggtaaattcacgatgtgatgccagcttaaccggcttatccatcagcgcggcgatcttttccacacgctccggatcgccagggacgatagccagcgtagccccttgtaaatcgttcttagtgaggccgagatgaaaaacatcagacttggacataaaaaactcctctgtgggtcgaagtatcagcagaagcaaaagggtactttacagaagccactcgcttatttttgtgatgatagtcaccatgcataacaatgattgcatttgtttttcaacaaatagtgatttacatcacattaacaagttatattcacggtcatagaacaaaagatagccgctttcaggcactgtgctttattaccgcccgaactaaagggtctatagttagtgttgcgctaataaataagggtacggagaataccatgaccaccaccaagcaacccggattcgcacctgcagcctcgccgcacgcctctaccgccgtccatacgtcggatgagcacattaccgccggagaaacctcgatcccatcgcagggcgagaatatgcctgcctatcacgcccgcccgaaaaacgccgacggcccgctgccgatcgttatcgtggtgcaggagattttcggcgtacatgaacatattcgcgatctgtgccgccgcctggcgcaggaaggctatctggcgattgcgccagaactctacttccgccagggcgatccgaatgagtatcacgatatcccaaccctgttcaaagaactggtcactaaggtgccggacgcgcaggtgctggcggatctcgaccacgtcgccagttgggcggcacgccacggcggcgatgcccatcgtctgctaatcaccggtttctgctggggcgggcgcatcacctggctgtatgccgcacataacccgcagttgaaggcggcggtcgcctggtatggcaaactggtgggagaaaaatcgctgaattcgccaaaacacccggtggatatcgccgtcgatctcaacgcgccggtacttggcctgtacggcgctaaagacgccagcatcccgcaggataccgtcgagaccatgcgccaggcgctgcgggcggcaaatgcgaacgccgagatcgtggtctatcccgaggccgatcacgcctttaacgccgactatcgcgccagctatcacgaagagtcagccaaagacggctggcagcggatgctggcctggtttactcaatatggcggtaaaaaagggtaactcgcctgatacatgaaaagaggaggccgtggcctcctctgttgttttccgcgtatctatcaggctgattcgcgcagattctgcgccgcttgcaccatgttcgccagcgcggcgcgggtttccggccagccacgggttttcaggccgcagtccgggttaacccacaagcgctccgccggaatacgctgcgcggccttctccagcaacccttcaatccactccacgctcggtacgtttggcgagtgaatatcataaacgcccgggccgatttcgttcggatattcgaactcttcgaacgactccagcagttccatgtcagagcgcgaggtttcaatggtgatgacgtcggcatccagcgcggcgatagaatccatgatgtcattgaactcgcaataacacatgtgggtatgaatctgggtgtcatccttagcaactgcggcattgatgcggaaagcttctacaccccactgtagataagcattccagtcgctgcgcttcagcggcaggccttcgcgtagtgccggttcatcaatctggataataccgataccggccgcctccagatccgccacttcatcgcgcagcgccagcgcaatctgcttcgcgatggtttcacggctgacatcctcgcgcgggaaggaccagcacagaatggttaccggaccggtcaacatgcctttgaccggcttgtcggtaagagactgcgcgtacttcgcccactcgacggtgatcgcttgcggacggctgacgtcgccgataaccaccggcggcttcacgcagcgagagccatagctttgcacccaaccgttttgcgtgaagatgaaaccgtccagatgttcgccgaaatactccaccatgtcgttacgctcggcttctccgtgcaccagcacatctaaacccagacgttcttgttcgacgatcgcctgcttaatatgttcggcaatacccgttcgataatggctagcgtcaagattgccctttttgaagtccagacgtagggtacgaatttcggttgtctgcgggaatgaaccgatcgtcgtcgtcggccatgctggcaggttaaagcgcttgcgctgcgcctgtgcgcgctcggcataagggctggtgcgctggctgtcctgcgcggtgattgccgccagccgtttttccactgccgcgttgtgtacgcgagtcgaatggcgacgagcctggattggcgcgctccacgcctcgatcgccgtcgtatcaccgctgttcagcgcatcgcgcagcagcgccagttcgccgcacttctgcagggcgaaagcaaaccaactttttacttcggcatcaagacgggtctctacgctcagatcgatcgggctatgcagcaaggagcaggaagaggcgacccatagctcacgttgaccgacaatcgccttaatttgcgcatatttttccgttaaatcggcgcgccagacgttacgaccgttgatgagacccgcagaaagcagccagtcggccggcagacgtttatgtagttcagcaacatcatctttgccatgcaccagatcgacgtgaagtccctgtaccggcagcgcggtaataacatcaaggttgtcggcaatcccttcaaaataggtagtcaacagtagttttacctgcccctgcagggcctcataagccggtttaaaggcatccagccatgcttgcggcagctccagtaccagcgccggttcatcaatctgcacccattcaatgccgcgcttcgccagctcgcccagtacctgctggtaaaccggaaggatatcgttcagcaggcttaaacggtcaaactgttcaccttttactttgcccagccacagatacgttaccggccccagcagtacaggcttaattttgtggcccagcgccagcgcttcgtccacttcatccagcagttgggtccagctcagcttgaactgctggccctggacaaattccggcaccatgtagtgatagttggtattgaaccacttggtcatttccgcggcggcagcgggttcgccggtcggcgcgcgaccgcgaccaatacggaacagagtatcgatatcgacggtgccgtctttgttctgatgacgagccggcacgttgcccaacagcaggctggtggtcagaacatggtcgtaccaggcaaaatcgcccaccggcagcagatcaatacctgcctgtttctgctgctcccagtgacgagcacgcagctcgcgacctaccgccagcagctcttcacgcgtggcgttgcccgcccagtagctctcttgcgcttttttcagctcgcggcgaaggccaacgcgaggaaaaccgagggtgtgattaataatggtcatgtgttcttcctctaattaattattaatctaaaggattttgtatttagggaaggcgcaagtttgcctcatccccaggagcttactgaagtaagtgactggggtgagcgaactcagccaacgcaccataaattcaaaatacgaaggattttagccatccagatgtttacaccgctataattcgcaagtactgtatattcctcaagcgcaaattattcatgccgaagtgaaggacattcatgatcgagattaagcacctgaaaacgctacaggcgttgcggaacagcggttcgctggcgggcgcggcggcagccctgcaccaaacccagtcggccctgtcccaccagtttagcgatctggaacagcgccttggcttccgtttgtttgtgcgtaaaagccagccgctacgcttcacgccgcaaggagaaattctgctgcagttggccaatcaggtgctgccgcagatcgctcgcgcgctacaggattgcaatgaaccacagcaaacccgtctgcggctggcgattgagtgccatagctgtattcaatggctcaccccggcgctggaaagcttccgcgcccgctggccgctggtggaagttgattttcagtccggcgtcacctttgacccgcagccagccctgcagcagggtgaactcgatctggtgatgacctcagatattttgccgcgtagcggtctgcactattcaccgatgtttgattatgaagttcgtctggtgttagctccggaacatccgctggcggcgaaaacgcgcatctccccggaggatctggctgcggaaacgttactgatttacccggtacagcgcgggcgactggatatctggcgccacttcctgcaaccggcggggatcagtccgcagttgaaaagcgtcgataacacgctgctgctgatccagatggttgccgcgcgaatggggatcgccgccctgccgcactgggtggtggaaagttttgaacgccagggtttaattgtcaccaaaaccctgggagaaggactatggagccggctgtacgctgcagtgcgcgatggcgagcaacgccagccggtaacagaagcgtttattcgctcagcgcggaatcacgcttgcgatcatctgccgtttgtacggagtgcggagcgacccagcggcgatggacccatagcgaagccaggattaccagcgcgccaatgataaagctcggccagtggggctgctcctgccagatagcgagattaaccaacagcccggcggggacgtgaacgttattcatgatccccaacgtaccggcatccacctgcgtcgcgccgtagttccacatgaaataacccaatccggaagcaaccacgccaagccagaccaggattccccactgcaggccggtagtcggtagcctctgcggattgcccagcataaaccacgccgctaccgccacgataaaggcgccggcatagaaccaggcaaaggcattatgttgcggcatcgggcggacttccatcaaacgcttgtagcccaccatgccgatggcgaagcagatattcgacaactgcaccagcaatagcccggtccagaaatgatcgctgactttgtcatagcggatgatcgccgcccctaacaccgccagcgccgcgctaagcagatagccccagcgcagtttacgaccgctgagcagatcgtaaatcagggtgatatacagcggggtaaagaccgtaaacaacagaaattccgagaccgtcagataaagataggcgcggaaagccagcaaatacatgatgccaagctgcatcgcccccactagcatatagagtacgatggtacgcggagactggccgcgggtacgcaggaaaggcagaaacaccagcgctgccaggcccacgcgcatcagcacggaaaaatagctatcgacgctaccggcaaggtattcgccaataagactaaaagaaaaggcccacaggatagtggtgataattaatagcgccacaatggtcgtctcattgaataaagaacaggcattgtagcggagagataggttgacgactgaccagttattagccagtcgtcaatctttatcaatcgaggtacaacttgcgcaggtaatgcggtacggcatcctcagcgttgctgccgatcacttccagctccggatgcaaatccttcaaccgctgatgggcgttcgccatgatgcagcctttaccggccatcgacagcatctcggcatcgttcatgccgtcgccaaaggcgatacactctttgaggctgtagccgagcattttcgcgacggcctccagcgcatgccctttcgaaacaccgccggccatcacttcaaggcaggtcaacgtggagaaactcacattgacgcggtcgccccagcgcgcgttgatagcctgctcaagcggcagcagatgttcatgatcttcacaggtgaagaaaactttgctgatgccatccgcatccagctcgcccggttcataaagcttgtagttgaacaccgcctctttgaagaagcgcatctcttccgggcgatggcgattcataaaccattcatcttcacgatagacgttggtcacaatcttcacatcgttacgcaccatctcaaacagatcgctggcgatatcgcggtcgaggttatgggcgaagatttgtttgccttcgctatcgtgtacccgcgcgccgttagaggtgatcatgtacgacttaatgccgagattatcgcggatttgtcccacatcgatatagtggcggccagtggcgaagacaaaatttatcccgcgtgcggtgagtagcttcagcgtctctttggcataaggggtgaggaaatggtcgggagaaagcagcgtgccatctaaatcagacgcaacaacctggtacataaaaaatttaacctctaagcagggcgacgagatctttcgtcggattaagtatgtcgattgaaaaaatcgacgatggcatttagcgcgactgagcgcatggcgtccttttcaaaaaggatctcgtgatatgccccttcaataacgagcggcttatcgccttcgcaagggtggccggcagcggaacggagttcacaatagcggtcgtgcatcaggttatcgaccaccctttcatcctcagcctgaatcaataacgtcggagtcgtatctttctcgacgccagacaatatctcttcgcctgccagaataccttcacgcacccagtgataggttggcccgccgacgcgcagccgcggatcgtcggcataaaaacgcaggttgcgacgatagcgctggcggctatgagtcaacacattgagcgaaaacggcaatgcccgccagcggcccgtaccgatggcatactcttcacgaatacgctgatggccctcagcccagtcgagaatatgacgcaccatccagtccggcaggcgcatgatgatgccaaacattggcgcgcataaggcaatggcgtcacaatgctgccggtgacgctgcaagaacagcgtggcaatggcgccgcccatcgagtgagcgagaataaaacgtttacgccagtggccgggaaccacttcctgctgccaaagcgcagccagatcgtcaacataatcgctaaagcgcacaacatgaccgcggtgggtatcagacagcaacctaccggagcgaccctggccgcggtgatcgataatcatcacgtcaaagccgctgtggaagagatcgtaggctagttcggcgtacttcacgtagctttcgatgcggccggggcaaatgaccaccagccggtcgttatttgcggcacaaaagcgcacaaagcgtaccggaaccttatcgacgcccgtaaattcagcttcttcccgctgatgccaaaaatccgtcagcggccccatggtaaaggccgcaaacgcgttttctcgtgtgtcccagtccttttgctgcccaaacatcgggtttacacccctgttaaccgctgaaaatcgtttttttgtcgcacatcacacaatgctgatgcaatagcgtattgtggcataaaaatagacaatcagggagattctcatgaccttcgagtggtggttcgcttatctgctgacatcaatcattctcagcctgtcgccgggctccggcgcgatcaataccatgaccacatccatcaaccacggctatcgcggcgcagcggcctctattgccggcctgcaaaccgggttggccattcatatcgtgctggtcggcgtcggtctgggcacgctcttctcacgctcggtactggcatttgaagtgttgaaatgggcgggcgcggcctatcttatctggctggggatccagcagtggcgggcggcgggctccatcgacctgaatacgctggcgcgaactcaaagccgcggtaaactctataaacgcgcggtgttcgtcaatctgaccaacccaaaaagtatcgtcttcctcgccgcgctatttccccagttcatcgttccgcatcagccgcaggtgatgcagtacctggtactcggcgtcaccaccattgtggtcgatatcattgtgatgatcggttacgcgacgctggcgcagcgcattgcggcctggattaaaggaccgaagcaaatgaaggcgctgaataaagtgtttggttcgctgtttatgctggtaggggcgctgctcgcttccgcccgtcatgcctgaaactggaatggcgctcgcatagcgcgaggccacttgcggccgtagtcgtattatcacgcgtgctggcgcgcaaagatgaaagagactttatccgcgcgctgtcgaccccgccatttcagtgccagaatgccgccattgggtttattcacggatgaacgaaatggcggaaacggcaacccctcatgatgcagtctttaagacctttctgtcgcgggtcgaaacggcgcgcgattttattgagattcaccttccaccggcgttaattgaggtttgcaaactggatacgctgcgcctggaatccgggagtttcctggaggatgacctgcggccctattacagcgacattctgtattcactagagacagcgcgtggccagggttatgtccatgtcctgatagaacaccaaagttcacccgataaactgatggcattccgtctaatgcgctacgccatcgccgccatgcagaggcatctggagaatggtcataaaactttaccgctggtaattcccattctcttttatcaaggacgccgcagcccctatccctggtcgctaaactggctggataattttgacgactcgatgcttgcacatcagctctattcaggcgcgtttccgctggtcgatattacagtgatccctgatgacgaaattatgcgccaccgcagcatagcggcgcttacgctggtacaaaaacatattcgccagcgcgatatggcacagctgctggacaagttgacccacctcttaatgttggagcagatgagcggacaacaaatcgccgtgctgataaaatacatggctcaggcgggagaagctcaggatattcgggcgctattgtatgggctggcacagcgtgtgccgcagcatggaggaatgctaatgactctggcagaaacgtggctcgcagaaggcagagagaaaggtattaaagaagggattaaagaagggattaaagaaggaaaactacaggcccttttacaggttgccgcagcgatgctcaatcgcggcatggatgacgatgctatcctggaaatgaccggtttgaccagggatgaactgcagcagcttcgtcactaatgtcagccccacccggcaataaaccgggtggataatcccattccgagttagcgcgaaataatcagatgaataccgaaaccggcaaacagggttccggcgatgccgtctatccactttgccatccgctgatagccgcgacgcattttcggcagtgcgaagagactggctacgatggtgaaccacgccagcgtttcaaggacgatcaacaggaaaattccccaacgcgccccggcgccaatgttatcgccaacgaacagtgaaaagaccgaaccgaaatagataatggctttcggattggcgaggttggtcagcaggcccttcaggaaactgcgcccgctacgcgccagctcaacctgcggttccgctgccgctaaatcgtttttcttcaacgcaccgcgcagcatttgatagcccatccagcacagatagagaccgccgccgaccataatcaacgtatgcagccaggccattttctcgataatcaggtgcaagccgagcagcgctacgcccgcccagaccatcacgccgcaggtgatccccagcacgcccatcatcgcctctttgcgcgagcggctcaccgcggtttgcgaaacgaagaaaaaatccggccccggactcattagcgcaatgatgtgcaccagcgccacggtgagaaaaagcatcaacatgtttaactcgcagggaaatagtgaagaaggaaactattctggcaccttttcccgcggctgactactcatcatcgccatcgacatgagcacgtatcagcgccatgaattctttaccgaagcgctcaagcttgcgggtccccacgccgttgacgctgagcatttcccggcggtgagcggcgactgttcggccatctcaataagcgtcgcgtcgttaaagacgacgtatggcgggatattctcctcgtcggcgatcgctttacgtaatttacgcagcttggcgaacagcttgcggtcgtaattgccgccaaaggatttctgcatcgctttcggttttagcgccacgatacgcggcacggcgagctgcagcgggacttcaccgcgcagtaccggacgcgcggcctcggtgagctgcagcgcggagtgctgagcaatattttgcgtaaccagcccgaggtggattaactggcgaatcacgctcacccagtgctcgtggctctgctcacgaccaataccgtaaaccggcagtttatcgtggttcaggtcgcggatacgctgattgttggcgccgcggagtacttcaaccacatagcccatcccgaagcgttgattcacccggtaaatagttgaaagcgccttacgcgcgtccattaagccatcgtactgctttggcggatcaagacagatatcacagttgccgcacggctcctgacgcccttcgccaaaatagttcagcagcaccagacggcgacaggtctgcgcttcggcaaaggcgcccatcgcattcagcttatgacgttcaatatcctgcagcggcccggcgggcttctcctccaggcaacggcgcagccacgccatatccgccggatcgtaaaacagcatcgcttccgccggcagcccgtcacgcccggcgcggccggtttcctgataataggattcaatattacgcgggatatcaaagtgcaccacaaagcggacgttcggcttgttaatgcccataccgaaggccaccgtcgccaccacgatctgcagatcgtcacgctggaatttctcctgcacatcggcacgaatatcattttccagaccagcatggtaggccgccgcgctgatgccgcggctctgcagcctggcggcggtgtcttcaactttagaacggctgttacagtagattatccctgatttaccgcgctgatcctggacgtaacgcatcaactgatcgaggggcttaaatttctccatcagcatatagcggatattggggcgatcgaagctactgacctgaatcagcggatcgttgagccccagcaggcgaacaatatcacggcgggtggtgtcatccgcggtggcggtgagcgccataaacggaatatgtggcatccgctgacgcagctggcccaacgcggcatattccgggcggaaatcatggccccactgcgagatacagtgcgcctcatccaccgccagcatcgctaagttccagtggctcagatgctccaggaagttgtccagcatcaggcgttccggcgcgatatacagcagacgaatctgcccgctgcggcaccccgccatcacctcttgctgctgttcgcggctctgcgtagagttaagacaggccgcggcgacgccgttcgccagcagctgatcgacctggtctttcatcagcgaaatcagcggcgataccaccaccgtcaggccgccgaggaccaatgcaggtacctgatagcacagcgacttcccgccgccggtcggcatcactacaaggcaatcgcggccttccagcgccgtggcgatgatcgattcctggcccgggcggaactgctggtagccgaaggtctcttgtaaaacctgcttagccagcgattcctgatttaatacttccgcctgtgccacgttgaccccattcgcctgaaaagaaaacaggcgctattttcagcgcctgagagccagagtgcaacgattaaaacagatcgttgagcatcacaccgacgcctacgcgcgtctgattgaagttatagtcgatgagcgactcgccataaccgctgtacacctgagtataggcgcgcacgtgtttggtaatagggtaactgaccccgatttccgcgccgccgtagccggtattccagttatattgcccctgagcgctaaaaatagcctcgccaagctggtagccaatcttcaggcggtagtaacccatatatttcgtaatatccgggttatcatcggtgctgccgaccacataccatggcttcacttcaaccagccagttaccgttttgcgccatcaggcgagtatacaggcggttccagctacgtgacgttggatcggaacggccgttagagtcatggttatagccgacttcgatatcgcgcaaggtccagccggcaaactcgtaatccgtcgcgaagccaaggaatagctgaggctcgtagttggtttcgcgaaacggcgccgagcctttactgttagagagctgccaccaggatttttgcgtataggaggcgccaagcagcgaattgtcgccgagaatgccgcgccataacgggaacgccaggctgagctggaactttacctcatccttacgcgcgtcatcggcccagtcataactacggatagcctctttattgagatcgctggtccatgtatagagcagatagttgctctcatatggataaagcaggaacggattatcatggtcctgcagcaggttggcgataatactaccccgtaccgcgggtttgtcatgaacggattgttcaatctgcgcgtcctgcgccagaacgcctgccggtagcgcgctaagcgccagcagccaggctaaagagatacgcattactgttctcctgaagaatggttcttattaatgttttgtcctgctgccattctacctatttatccacctcccgctgcgttatcgcctccgaaagtggaaatcaatatttttgaagcataaaatcaacatttcattaacgaatggacctctgctatgtctgaactgaccgccgccgccgcgctaaagctggtgggagagatttttgtttatcacatgccttttaaccgtgcccttggactggaactggagcgttatgaaaaggagtttgcccagctcagctttaataatcagccgatgatggttggcaactgggcgcagagtatcctgcacggcggcgttattgcgtctgcgctggatgtcgccgctggactggtctgcgttggcagcaccctgactcgtcacgacaccatcaacgaagaagagctgcgccagcgtctctcgcgaatgggaactatcgatttacgcgtcgattatttacgccctggtcgcggtgagcgctttaccgccaccagcagcctgctgcgtgccggaaacaaagtcgccgtggcccgcgtcgagctgcataacgaagagcaggtttatatcgccagcgccacggccacctatatggtgggttgattgccgcagatcgagtaacatcactctctttggcaatggattctaccaatggacgcaaaacaaacgcggctgggcgttatgctggcgctggccgcctactttatctggggtatcgcgccggcgtacttcaaacttatttactacgttcccgccgatgaaatcctgacgcatcgcgtgatctggtctttctttttcatggtggcgctcatcagcgtcagccgccagtggcagcaggtaaaaaaactgctaaaaaccccgcgcaagatcttcctgctggcgctctctgcagtgctggtcggcggcaactggttgctgtttatctgggcggtcaataaccaccatatgctggaagctagtctcggctacttcatcaacccgctggtaaatattctgttgggaatgattttcctcggcgaacgctttcgtcggctgcagtggttggcggtgatcctcgctttttgcggcgtactggtgcaactttggaccttcggttcgctgccgatcatcggtctggggctagccttcagctttgccttctacggactggtacgtaagaaaatcgccgtcgatgcgcagaccggcatgttggtggaaacgctatggctgctgccagtggcggcgatctggcttttcggcatcaccgatagccccaccagccatatgggagacaacccctggtcgctcaatttactgctgatggccgcgggcgtggtaactaccatccccctgctgtgctttaccggtgcggcgacccgcctgcgcctgtcaacgttgggctttttccagtacattggtccgacgctgatgttcctgctggcggtaacgttctacggtgaagtgccgggcacggataagatggtaaccttcgcctttatctgggtggcgctggcgatattcgtgatggatgcggtatatacgcaaagacgggtacgccggggataggatattacccgatgtcggctacgccttatccggcctacaaaagcacaacacgtaggccggataagcgaagcgcatccggcacaacaactacagccagtttttacgcttgaagtagagataaggcgccaggcctgccaacatcataaacacgatggctcccggataaccaaagctccagtgtagttccggcataaactcaaagttcatcccatagctggacgccaccagcgtcggcggcaggaacacgaccgaaaccaccgagaagatcttgataatgcggttctgctcgatgttgataaagcccatcgccgcctgcatcaggaagttcaccttctggaacagcgattcgttgtgcggcagcagggattcgatatctcgcaggatctctcgcgcctgttccagctggcctgccggcaggcgcgccttgcgcacgagaaagtttagcgcgcgctgagtatccatcagacagaggcgaaccttccagccgatatcttccagttccgccagcgtcgacagcgcttcatcgtactcgtcgccctggtggccttccataatcacgcggctcagcttttccaggtcgctgtagatgttttctatctcatccgccagctgttcgattttagtctcgaacagatctaacagcagctcataggcgttgccgtcgaccagcgtctggttacgtacgcgcatgcggtacaggcgaaaagcgggcagttcacgctcacgcaatgtaaacaggcggccttcgcggatggtaaacgccacggttgagttacccgcgtgatcgtcggcatcttcgaaaaagaaaaaggagtggatgtgtaaaccatcttcgtcttcaaagaaacgcgctgacgcttcgatgtcttccagttccgggcgcgttgccagattctggcctaactccgtttgcacacggctacgttcgtcatcgtctggctcgaccagatcgacccacaccgagctggcgagatgcttgatctcatcggcctcaaggcgcgttaaacgattattttccagttgaaatgcgctcagcatgaccgggactcccaatacaaaaaatttatcggacagttcgatgggcacacagaaactatttgggtttcagaccattaagcctgactcagagcgacggggataggacgagtcgccgacaaccgctaaggctatcggcataaggggatagccttaggagttgttcctgaatgacaggaagttgagccagcatctactgggtgtgtccaaggcgaatgtcctcttagcgtaatcgtgcgcgcatgttacgccagcgccaaaacggcgtcaacacgcaagggaacgctaaagagcaaatcctgccctttagcatataaggctagcagattattacaaaaaattatatttttcttaaagttacaccgtttccagccgggcataggcggcaaccagccatttaattccctgcccctggaatgccacctgcagccggctatgttcaccgctgccctcaaggtttacgatggtgccttcaccgaacttcggatgccgaacccgctgacccagtttatagccggtatcgttctccgccaccggggtaccgaggcgctgatggttaaccgggcggctcaccgtcgcccgtaaccgcacttcctccacgcactcttccggcagctcgccgataaagcgcgatgggcgatggtaaacctctttgccgtacaaacggcgggtttcggcgtaggtcagcgtcagtttctgcatcgcgcgcgtcacgccgacgtaggccagacgacgctcttcctccagacgaccaccttcatcaaacgccatctgactcgggaacatcccctcttcaacgccgacgataaacacctgcgggaactccaggcctttcgccgagtgcagagtcatcagctgtaccgcatcctgccaggtatccgcctgcccttcgccggcttccagcgcggcgtgggagaggaacgcctgcagcggcatcagatcttcatcttcttcgttgtagctgaactggcgcgtcgccgtcaccagttcctccaggttttcgatacgggtctggcccttctcgcctttctcctgctcgtacatcatacgcaggccggaatctttaatgacccggtcagtctggacatgcagtggcatatcggcggtttcctgcgccagcgcgtcgataagctccataaagcgctgcagagcgctggcagcgcggccagccagcgctttctctttcagcagctcgcggcaggcctgccacagagtcagctgacgatcgcgcgaggtctggcgcaccacatccagggtacgatcgccgatgccgcgggtaggcgtattgaccacacgctcaaacgccgcgtcgtcattgcggttggcaatcaggcgcagataagagagcgcatctttgatttcctgacgttcgaagaagcgcatgccgccgtagatacggtaaggcatgctggcctgtagtagcgcctcttccagcacacgcgactgggcgttgctacgatagagaatggcgcactgctccagcgctccgccgttctcctgccaggttttaattcggttaaccacgaaacgcgcttcatcgagatcgttgaaggcgcagtacagcgaaattggctcgccgtcggcgccgtcggtccacagttttttgcccaaccgcccgttgttgttttcaatcagggcgttggcggcgctgagaatattgctggtcgaacgatagttctgctccagacggatagtttccgccccgggaagtcattcaggaagcgttgaatgttttcgacctgggcgccgcgccaaccgtaaatcgattggtcatcatcgccgacaatcatcactttgccagtatcgcccgccagcaggcggatccaggcatattgaatgttgttggtatcctggaattcgtcgacgagaatattggtgaagcgctcgcggtagtgctgcaggatatgcggtttgttcagccacagctcgtgcgcgcgcagcagcagctcggcgaagtccaccagcccggcgcgatcgcaggcttcctgataggcctgatacaccttctgccaggtctgttcgaccgggttgccgtagctctgaatatggtgcggacgcagcccttcatctttttggctgttgatgtaccacatcgcctgacgcggcggccattgcttctcatccaggttcatcgccttaatcaggcgcttcagcagacgcagctggtcttcgctatcgaggatttggaaatcctgcggcaggttggcatccagatgatgggcgcgtagcaggcgatgggccaggccatggaaggtgccgacccacataccgccctgggtggtgcccatcagttggccgatacggtggcgcatctccgccgccgctttgttggtaaaggtcaccgccataatggaatacggcgagcagttctccacgctcagcagccaggcgatacgatgcaccagtacgcgcgtcttaccactgcccgcccctgccagaaccagcatattggtgcgcgaggccgctacggcttcacgctgtttgtcattaaggctgtcgagcaggtaagaaacgtccattggcaccgccggaagagaaggggttccacgaacccctgttaatatatacagagttactggtgattatatcagcgaggtcagagatgccaaccgtgaaatttcaatatgcggcagcaggcggctatcggcggttttcatcaacgacgcgtcctgcggcttgatccagcaggcctgcattccacagcgaatagcgcccgccacgtcggtggtcagatcatcgccgacgtgcagaatctgtccgaggggtaaatccagacgctccgccgccagatggtacatatcggcaaacggcttggagcgaccgtccggacccgcgcgcagcacgaaacggaaatagtcattcagcccgaacagttccggctgggcgttaccgttggtgatagccaccagcggccatttctgcgccagcttcgccagcgtatcgtgcgtctcttgcggcacgtcgacgcggctgcgccagtgggcgaaattttccatcgccgcatcggcgccggctttcgcctcggcggcggagagcccggcgttacgcatccctaactccagcgcgcggtggcgccagacggtgacgtcatgataaatctcaggttctgaggacagtagcgtttgtcgcagttgattaagcgcatgggcatcaaactggctcagcgccggatggtaattgcgcacaaacgtcagcgattcctgcatcgtccggtcaatcaccgggcggttatcgtaaagggtgtcatccaggtcgaacgtcagcgcggagatcgggcccagaggtcggtaaaaacgcattatttcccccgtttagcgcgcggatgcgcggcatcgtacaccgaggcaaggtgttgaaaatcgagatgggtatagatttgggtggtggagagattggcatgccccagcaactcctgcacgccgcgcagatcgccgctcgactccagcatatgcgtcgcgaaggagtggcgtagcttatgcggatgcacgtggctattgagtccctgcttgatcccccactcggcaaaccgcttctgcacgttgcgcgctgaaatgcgcttacccagcttcgacaaaaacagcgcgtcatcatcgccgccgaacaagccgcgcaaatccagccagtgttcgatccacgccaccgcatttcgtccaattggcaggcggcgctctttgctgcctttccccatcacccacacttcccctgactcaagatcaaggtgcttaatatcaaggttaactaactcagaaagacgcagccccgccccgtacatcacttccagcatcgcccggtcacgcaccgcgagcgggtcgttaaggtcgatatccagcagccgattcacatcatcaacgtcgatatttttcggcaaatggcgggggatcttcggcgccgcaatccccttcgccgggttagcggccagctcgccctgactgaccatccagtcgaaaaagctgcgcagggcggaaagccgtagcgccaggctcgccgggcctaagcccgcacggcggctgcgcacggcaaagttacgtacctgagcggcgtcgcactgctgccagcttgtcaccccggcatcctccgccagcgcgattagcgcttccagctgacgctggtaattcgtgagcgtaatggggctaagctggcgctcaacgccgagataacgcagaaagcgatcgacgcaggaaaatagcggggagtggctcatgcgcgttcaatccagcgctccagcaggccgggcagcatacgggcgatctcctgcagtagctgcgtcccctggccttgctgataatgctgcggatcgcggctgctgaaaaacatcacccccggcgcgtcatcatcgcccagtagcgacatcgccaccgagccgatagctttcgcatccggcagcaccaccagcagctctggcccattcagcggcccaagatagtgacgtgcctggcccagccgctggatacgaatgggttcgaacgcctgtcggctcaacgccagatgggtgaatttagacggcgcgccgagatgccagctgtccggaaacaggcgcaccgtcgcgcctgccaggccaagctcgcgcgcccaacgatgaaagcggttgagcatttcatccaggctatcggcggacgccaggcgcgtctgcagatggaacaggcgctgaaacaggctttgattggccgtcgcctgttccatcagcagcgtcatattctcttccagcacgttgatatggttacgcgcccgcagcatatgccactctaccagcgagatggtgccgcgcaccggatgcgggacgcggatatgctcaacctgcgccgcattacgaataaagaactcaggattttgcagcagataatctactaccgcgctgtcgtcaagcgctgtggcgagttcctgctgttcttccccgatctgtttcatagatgaataaatccgtcgtagacgtgtgccgccgggccagtcatatacaacggttgacccggacctttccaggcgatgtcgagacgcccgcctggcaattccacgcgtacctcttcggcgagtaatccctgttggataccgaccgccaccgccgcacaggcgccgctgccgcaggcctgcgtttcacctgcgccgcgttcatagacgcgcagacgaatatgggagcgttccactacctgcataaagccgatattggcgcgttccggaaaacgttcgtggctttccatcaccggaccgagggtttcaaccgcggcggtgtccacgttatcgacctgaatcacgcagtgcgggttgcccattgagacaacgccgcacaatactgtctgttcagccgcgcgcataatataggtcttttccgctttgttggcgcggaacggaacctgagacggctcgaaattcggctcgcccatgttaacgcgcaccagatcatcttccgttacgcttaataccatacgaccgttggcggtgctcacgcggatatcacgtttattggtcaggccttttaaacggacaaagcgggcgaagcagcgcgcgccgttgccgcactgcgagacttcgctaccgtcggcattgaagatacggtagtggaagtccagatcgggatcgtacggcggctcgacaaccaacagctggtcgaagccgacgccaagatgccgatccgccaggcgacgaatcagctccggtgagaagaaaacattctgcgttaccgcatcaacaaccatgaagtcgttgccgaggccatgcattttagagaactgcattatctactccaattgcgcggaacagaacgtgatcgttaatagttaacctgggtcggaccgccattatcgccgcgatcgttacgatccggcgtcgcgctctgaatgccagggttaaccggcttggtcggcggcggcgcggttttgtctgccggcgggaaatacagcggccctttcaaaccgcagccggtcaggctgaagattgcaaacagaacggcaagcgtgggtaaaacgtttttcattgatagttgcccatgattcattcgttactgctttctatcatcgcaggagaagacgtaaaagcaagcgtttagcatctgactgcacgcgcttttgtttcgcgctatactgcggccatcttcaaaaaagcaggatagaaccatgaacgacagtgaattccatcgcctggcggatagcctgtggatgaccatcgaagaacgtctggacgactgggacggcgacagcgatatcgactgcgaaatcaacggcggcgtgctgaccatcagcttcgaaaatggcagtaaaatcattattaaccgtcaggaaccgctgcatcaggtctggctggcgaccaagcaaggcggctatcacttcgatctgcaaggcgacgagtggatctgcgatcgtagcggcgaacgcttctgggatctgctggagcaggcggcgagcaatcagtccggcgagacggtgagcttccgttaatgaggtgtttcccggatggcggcgcatcgcgccttatccgggccaaatctacgagtagcgctgctgcagcaccggtgaagcgaccgcttcctggcccggtggcaccgcggcggcaatcgcctgactgcggaacggtatcacctgagtgcgcccgtcaacttcgactatctgatagaactgcggcaggttgaagttaatgaagcttgagccgtaggtgaagcgatcgtgcgatgatgaatagaagcggctgacgtcgcgcaccagctcttctttgctgccctcgcagtggtgatagacctcggcgcggttgctttcatcgagaatgtagatgttaaagccgctgtcattgttatccgcatcttcaaagaagaattgaataatcccttcgctggcgaaaccatccaccaccgccggcagcttaacgtgattggtttctacctgtaccgacaggccgtggagcttgttgtgcgagatagcgccgtagaactcaatggcgttttccagcttctgcaccgaaacgttcaggcgttcaaagaacaggccccaggtctggcctgagacgcgcagcgctttgaagcgcccggtatcctgacgggtactggagaggcgcagttcgatacactcggagaccatctgctgcacgcgggtgcgaataaggccgcgcagatgctggctgtagcagaacacctccacgctatccggcggcgcggcgtcctgatgcattttaccgagaatagttttcagcgcttcgatcatcgcctgctcgccgttaaagtgcagcgtgcgcacttcgttccacgagttgcgatacagcaggtcgacgctgccaatcaggcatttttgctcttcgccgaagctgaaaacatcgagcttacggaagtcgaaatgcaccacctgattgcggaaagccgccgtcgggtcatattcgaggttgacgataatcgccaggtggcgaatttcgcacgggctgtacagcgcttttggcgtcggcgccggcagacgcagcgggaagtggtgcgacacgtcggccaccatctcctgcagcttcggcaaatcgacgataccgttgcccttaataaacagacgggtgcgtgaggtcagcaggccgttaaaccaggcccaggccaccagtttattaagataacggttatattccagcggctgatggctgatgatcgattccatatccggcgcgcggttatacagataccaaccggtacggttggcgcgccccggcggtacgtggataaaggtcagattcggttccgacaggtccggtgaaatttgcgggtttaccagggtaactttgcccggcagggcttcaaaggccgcatacagcttacgcgtcagcacgccgatatcctgcgggctggcggagacgctgaggttattgcggcgcgcgaagcgaatcagattacgatagctctgcatcatcgcgtcgagcagttcgttgtgcgctttgcgcacttcatcgattttccagttagcgcggttatcaagcatcatcagacgcttttcatcccatccccactctttcaccagttggctgacgacttcacgacgccaacccacgcaggctcgctcgcggctgagtttttcacagactttcagatagaagcagcgacgaaccagatcgagacgggtgtcgtcttcgatagcctgcagataggcggttacgcgctccagcatcatgcagtaggggtcgagaccgaatgagacaatctcgccatcgtgcaggcgctgtttaatatctttcgccaacaggcggttgttggggtattcccacgagtaggcttccagcagcagcgttttcagcaccgctttatacggggagtcgatgctcttatacagctgccacaggctggcgccgaagtactcttccgccgacagcgaactgaggccaccgagatcgagccattcgtttggcgtcagcacgccctgggcatacagccccatcacgtaatcatcgtaatggtcttcttcatcgcccggcaccatattccacagaatacgtttcccggcgagacgcacggcggtgcgataaaattcatcgagtaacaaaatatgctgggtcgaaccacagtcttcgccgccgaggctgccgctttcgttgtggcggaagcggttttcgtcgatcaggaagaaactgacctcgacgccgagcgacgccgcccagctttcaagcaggctgcatttacgctgcagcagttggcgttcttcgttatccagccaggcctgatggcatacccagatatccagatcggaagagcagctttgcccgacggaagaggtactgcccatcgaatagacgccggtaatcggcagttcgcctttcggcggctcctgcgttagcaggccgcgatgcagttcgagttcgtcaagatagtggcgttgggtttcatcaggcgtgtagaggcaaatgccgcggggaacgttaccgtcaaggtaacccggcatcagcgggtgatgataatgtagtaatgtcggcagaagactgtaaacctgctggaaagcgggtcccatggcagcaagcgcgcgatccacgcgcagttggttgatggcatccagtctctgtttcagtgtctcaatatagaggtacaagacatatcgcctgatgttcaaaaatccgacgtacaatagtacggaggatttcagtatttcaacaagaaccgtcaccattcgtcatcggtgtggttgtgatgaactgctggctgacaaatggtttaaaacgtgatcaatttaacaccttgctgattgaccgtaaagaaagatgcgctacatacaagtgtagcaccgtttgccgggtgtaaattccccactacgcttgcggcaaccgcacgcgcatgaaacgctaaaggtcatcatgccagcatcccacattaaccgtgaaactaacatccctaaagcaacaatgttaggatggctcatggtcgacaatgacggtaacaagcatgttagacaaagttttgagaattgccacacggcaaagcccgcttgcgctatggcaggcacattatgtgaaagagcttctggagtcctgtcatccggggctttccgttgagctggtgccaatggtcacccgcggcgacgtgctccttgataccccgctggcgaaagtgggcggcaagggcttatttgtgaaagagttagagctcgccatgattgaggggcgcgccgatattgccgtccattcgatgaaagatgtcccggtagaattccctgaaggcctgggattggtcaccatctgcgaacgtgaagatccgcgcgacgcctttgtttccaatcactatgcctcaattgacgagctgccggctggcagcatcgttggcacgtcaagtttacgtcgccagtgccagttagcggcaaagcgccccgatctggtgatccgctcgctacgcggcaacgttggcacgcggttaggcaaactcgataacggcgagtatgacgctattatccttgccgccgccgggttgaagcgcctgaaactggaagcgcgcattcgccagccgctctcgcctgagcaatctctgccggccgtcggccagggcgcggtgggtatcgaatgccgccttgacgatgaatggaccaaagcgctgctagcgccgcttaaccatacggaaaccgccgtgcgcgtacgagcggagcgggcaatgaacactcgtctcgaaggcggttgtcaggtgccaattggcagctatgccgaactgcgcgatggtgagctgtggctacgagcgctggtgggcgcgccggatggttcgcgggtcgtgcgcggtgaacgccgcgggcggcctgaagaggcagaggcgctcggcgtctcgctggcggaagagctactggataacggcgcccgcgacatcctcgcggcggtctatgatggagaagccccacgatgagcatcctggtcacccgtccgctaccgcaaggtgaagagttagtcagccgcctgcgcgcgctgggacgcgtggcctggagctttccgctgattgaattcgcgccggggcgagaactggcagcgctcccgagtcaactggcggcattaggcgcggacgatttattgtttgcgctgtcgcagcatgcggtggaatttgcccatgcccgtctgctgcaggagagccaacgctggccctccgacccggcctatttctcgataggccgcaccaccgcgctggccctgcatacggtcagtggtaaaaatatccgttacccgttagatcgggaaatcagcgaagtcttgctacaattacctgaattacaaaacattgcgggcaagaaagccctgattctgcgcggcaacggcgggcgggaattattaggcgacacgctgcgtgaacgcggcgccgaagtaacattttgtgaatgttatcaacgttgtgcgaagtactatgatggtgcggaagaggctatgcgctggcaatctcgcggagtcactacgctggtagtcaccagcggcgagatgctacagcagctgtgggcgttaataccccagtggtatcgcgaacagtggctgctgcactgtagccttgtcgttgtcagcgaacgtctggcccttcaggcccgggaattgggctggcaggatattcaggttgccgataacgccgacaacgatgcgctgctacgcgcattacaataactctcaacattggaagccataatgacggaacaacaaaatcaatccgccgtggttgaagagaccagggaggccgtggaaaccacgccacagccagaaaacaacgagaagaaaaaggccggcaacaaaaccagcctggcgctcagcgcgattgctatcgctatcgccctcgccgccggtattggcctgtatggcttgaataagcaacaggttacgcggcaaaacgaaaccagttctgaattatcaagccagctcgcggcgctgcaaaaagcgcaggacagccagaagagcgagctggaaggcattatcaaacagcaggccgatcggctgagcgaagccaaacgtgaacaggaaaccctgacgaaacagcttgatgagctacagcaaaaagttgccgtgatttccggcagcgacgccaaaacctggctgctggcgcaggctgatttcctggtcaagctggcgggacgtaaactgtggagcgatcaggatgtgacgaccgccgccgcgctgctgaaaagcgccgatgccagcctcgccgacatgaacgacccaagccttatcggcgcgcgccgcgccatcaccgatgacatcgcttcgctgtcggcggtaagccaggtcgattacgacggcattatcctcaaggttaaccagctggcgaatcaaatcgacaatctgcgtctggccgataataacgacgatgattctccgatggattccgacagcgacgagctctccagctccatcggcgaatggcgcgttaacctgcagaaaagctggcagaactttatggatagctttattaccatacgccgccgcgacgaaacggcggtgccgctgttagcgccgaatcaggatgtctatctgcgcgaaaatatccgttctcgtctgctggtcgccgcgcaggcggtgccgcgtcatcaggaagaaacctataagcaggcgctggaaaacgtctccacctgggtacgcgcttattacgatactgaagacgccaccaccaaggcttttcttgaagaggtggataagctcagtcagcagagtatcaccatgagcgtgccggaaacgctgcagagccagagtctgctggaaaagctgatgcaaacccgtgtgcgtaatttaatggcccagcctgcggcagccgctccgacgccagcgccagcagcgaccgcgccagcacctgcgccgcaaggagaataaccgatgctgaaaattctcctgcttttcgcactgctgatcgccgggatcgtcgttgggccgatgatcgcgggccatcagggctacgttctgatccagaccgataactacaatatcgaaaccagcgtgacgggccttgtgatcatcctgatcctcgcaatggtcgtgctgtttgctatcgagtggcttctgcgccgcattttccgtaccggcgcgcacactcgcggctggttcgtcggccgtaagcgccgccgcgcgcgtaaacaaaccgagcaagcgctgctgaaactggcggaaggcgattaccaacaggttgaaaagctgatggcgaaaaatgccgatcacgccgaacaaccggtcgtgaactatctgttagcggcggaagctgcccaacagcgcggcgatgaagctcgcgccaatcagcatcttgagcgtgccgccgaactggctggcgacgatctgatcccggtcgaaatcacccgcgtgcgcctacagctggcgcggaatgaaaaccacgccgcccgtcacggcatcgataagctgctggaagtgaccccgcgtcatcctgaggtgctacgtctcgccgagcaggcctatacccgcaccggcgcttggaattcgctgctggatatcattccgtccatggcgaaagccaacgtggcggatgaagagcaccgcgccgcgctggaacagctagcgtggattggcctgatggataaagcgctggccgacggcggtagcgaagggctacgcgaatggtggcgcaaccagagtcgtaaaacgcgcgcgctgataccgctgcaggtggcaatggccgaacgcctgatcgaaagcgacgatcacgataccgctcagcagattattatcgatggtctgaagaaacagtacgacgaccgcctggtcatgccgatcccgcggctgaagaccaataatcctgaacaactggaaaaagtgctgcgccagcagatcaaagccgtcggcgaccgtccgctgctgtggagcaccctgggccagtcgctgatgcgtcatggtgaatggcaagaggccagtatcgccttccgcgccgcgcttaagcagcgcccggatgcctttgattacgcgtggcttgccgatgcgctcgaccgcctgcaccagccggaagaagcggcgaccatgcgtcgtgacggcctgctgttgacgctacacaataatcctcagcagtaattccacgataacgctatcgcctcattcgggcgatagcgccctcctgacgcgaaaagatcaccttcccctgaaagaaaaaaacgcctgctctgaaaccagggcaggcgttaaaacaggtctgtttgacaacaaattgggtgcttcactcaacgttatgtccatggtgtttgatgagacatataaaatgcgacatctatcagtggacgataagcaccgtaagtacggctctgcatcattcccgagtttatgaggcacgaaggcgaacataagagatggaatgagcatctacccggttattatcgcacaggatccaggggattgcatctatcgcaacgatcatttgggacaattccggacaataattcgcagaggtagaaccttttttttacgagaaagatcagcgggataaaagaggattgggcaaagccggaaaacaaaaaaccccgccgaagcggggttcaaaattggtcggcgagagaggattcgaacctccgacccactggtcccaaaccagttgcgctaccaagctgcgctactcgccgaaatactgcttttttgaatttttagttcaattctttaaagtcgtggtgcgagggggggacttgaacccccacgtccgtaagaacactaacacctgaagctagcgcgtctaccaattccgccaccttcgcaattcacaactctatcaaataatggggtggctaatgggattcgaacccacgacaactggaatcacaatccagggctctaccaactgagctatagccaccacaacaattcttttacgcggtattaaaaccaccgcagctccagcaccgggtaaatggtgcgcccgacaggattcgaacctgagacctctgcctccggagggcagcgctctatccagctgagctacgggcgcttagcgccgttgcggggtggataatacggacttccccacccctgtctagtgcctttttaaataaaatttctatttgctcacagtttgtgcgctttggcgcttattccgccgttttatcgagatttccccgcttgccgaggccgaaaaccttatagataagggtcaccacggcgaggaaaatcattccgacaaagagcgacatccgggtttcatcgttaattcccatgccgatcagcacacaaacgaggaaggccatcgtcaaatagtttgcccacgggaacagcaatgaacggaatggatggctggccatcgcctgctgatgctcgcgacggaaacgaagctggctaatcaggatcacaaaccacggcaccatccccggcaacacgctggcgctatagacatagacaaatacacgctgcgggttaggaataatgtagttcaggcacgaaccgattagcagaatcactatcgacagcgcgacgcccgctacaggtacgccctgacgcgacactttggccattgccgccggtagctgacggttgcgcgccagtgcgtacagcatacgcccacagctatacatcccgctgttacagcccgacagtgctgcggtcagcaccacgaagttgataatccccgccgccgcggtaatgccgattttggcgaaggtcaggacgaacgggctaccggtcgatccaatctggttccacgggaagatagtcacgataacgaaaatcgcgcccacgtaaaaaatcaggatacgccacagcaccttacccacagcgctacgcaacgtgacctgcgggtttttcgcttccccggcggtgataccgataagttcaacgccctgataagaggcgacgacaatacacagcgccgtcaggaagcctttccagccgccggcgaagaagccgccgtgctcggtcaggttgccaaaaccgatcgactgtccgccgttgccgaagccaaagaagataacgcccaggccgatgacaatcatcacgataatggtggtgactttaatcatcgcaaaccagaactcgatctcaccgtacagacgcactgccgccagattcgctagtgctaccaacccaacggcaatcagcgccgggatccactgcgccatccccgggaaccagaactgcacgtataccccgatggcggtaatctctgatattcccaccgccatccacataaaccagtatgaccaggctgtgagatagccgaagaacgggctcatataacggtgcgcgtaaacggcgaatgagccggttaccggttcgaggaacaacatttcgcccatcgaacgcatgataaagaagacaaataaaccggcgataatatacgccagcaggacagaagggccggcccacttcaacgtacttgccgcgcccataaataagcctacgccaatcgtcccacctagcgcgattagctcaatatgtcgggcctccagtccacgctggagttccgcttttttctcagtcataaagcctcttgtgtttgctgtattccgggtactcccggttattgttattaattgaaaccatagccttgccgacgcgcaggtctcccccacgcgtttgaagcatgcgaatggttaattaattttacggaaatggcaaataaagtatcaggcgagtgaagagattacacagaatatgtatgcaatctcgcctggttgcagtggaatatcagagcttgccggaataatgccaacgtaaatagcgcagtaaacggaactgtcttttgatgcggctcggttgcaggagcaggcgatagaaccactccagccccaggttctgccagaattttggcgcccggtgaacgtggccggtaaagacgtcataagtgccgccaacgcccatatacagcgcggcgggatataccatccgacagtcgcgcatcagaatttcctggcgcggcgatcccatcgcgacggtgacaattttcgccccgctgtcgcgcacccgctcaaacagctgctgacgctgatcggcggaaaaatagccgtcctgactgccgacgatattgaccttccagcgctcacgcagcttcgcttgcgtctccgccagcacctcggacttgccgccgatcaggaacaccggcgttccctggacgccagccatctccatcagcgcttcccacagatcggcgccggcaacgcgcgacacctcagcctgcggatattttttgcgtaatgaacgcacgacgctaatgccgtcggcatatttaaactcggcggcctcaatcagcgcacgcacttccgggttatcttctaccgccagcattttttcggcgttgatcgcgaccagcgttccctgacgcagttcgccgtcggcgaagagatagttgagcgcatgctgcatgtcgcgccagccaataagctgcagccctcgcagcgcatactgcggcgcggaagtgttatcagtcatgttcatccttatcatacctgcggttgcgaaagcggcttcacccgcttatgaatcaatcctgcgctgtccaggagccagtacagcaatttcgccgctaacaagcagataccaaagatcacgaggaaaaacaccacgcgggagccgaacgaatccaacccttcgcgcgccagcactatcatgttgaagatagcgccgaaacagaaactgtgcaggatagccgctttgtagcgattgctctcccgattgccaagttcgtacaaccagtcaaaccatttaatgataagccctaccgcgacggcacccagcggtacgaaccatacgccgcccatcaccaccagcgaaccaatcagcgtcggcgatatcgccaaccccgagtggttgtttaacacttcccaggtgaagtaattggcggtattcagcaccattgtcgggcgaccgtgccacatccaactggggataaagacgtagaagtcacggatcatcggcgccagcccctggaactcaatcttgtcgtagttctgcagcaacagcgccaggttctcccacggcgagaaggtatcgcgcgtgagatagaggaaagtataaaacgcttcatcgccgctaacgttcatcccatagcgcttcaacgccagccagaacatgccgacaatacccagcacgcccgccgccgccagcatccacaggctgatccagccgcgaataatgccgataaacaggaagatagcgaaagcgataatgatattggcgcgggtaccgccgacgatcgcgtaggtcagcaggccaaaggcgacggtgctcaccaggaagaaaatccacgccttgtaatcctgacgcaggaaatagatcaccagcatcgccggaataaagaagtagaagaagcgcttcaacgccacgccggacacttccgcggagaatatctggctgtatgaattgagcttaaatagcaggaaaccattgtgggcgaagaagataccgacgcacagcagcgccagccccatcaatatccccaggccagatgggtttcaacccggttcatggtaaacagcggacgacgtggaacatcacgcgttgccggacgcaatcgcgttttgtaggtcacgtagtagatggcatagaagcacaccgcaaccagcagcgtctgcaacaaaatttccggcggcgccacgctgacgtcaaagcggaacaccaggatactggttaacgggaagccgaagaaaaaggtgagcaggaacaacaacgagaaaaagacgttgaagttaaagcgcacgcggcggaactcaaaccaggtggcggtggcgataaacagcgtcgacagcagccagaccaccaacagcccgctaaattgcattaacgtcatacccgcgcctccgccgccagctgtagcgcccgctgccagcccgccagatagttcgggcggaagaaggcgatttgcgttttatcaacgctcgctaactgacgctgtgcttcgcgcaccacgtcggcgtccagggtatcggtggtaaacagcaccgggatctgttgttcggtcatatcctgccagaacggattttcgcgattgagcacgcagggaatacccgcctgaatcagcaggcacagcgtgccgataccctgctggcgcgcaaacaggaaataacccagatcgcagcggcgcagcagcgccagataatcatcaaactcaagcttctcgctaaggatctgcagatgctcgcgactaaacagcgccgctcccatctgacgcacttcatcaatgtaggcttcattgttggccggataacccatcggcacgatgacattcaccgtatcgccaaactgctgatgaatcgcctttagcgctgcaatatgctcattactacgatcgccggaatttcctaccagaatggtcagggtgtcaccgcgcggggcggtatcggcaagggagtttagcgccggatccatacgggtcgggaagtacagtagttcgcccggcactcgcggatggcggttagcaaaccagctgagatcgccgcgggtggcgaagacgcgccctacccgcccttgcgccatgcggcgcagaggataaaacagacgaaatttcaggctggctgagttttcatacagatccgcgccccagatatgccagttaaattgcgatgggcggataccgccgctcaacagcgccagccacagaccagtattaaactgaccgtggaaaaaaaagcgctgctggcgatcggctttcgctttagcgatcgccgcctgcgccagcgatttcttacccggatagcaggtaatctccagcgccggatacgcctcgcgcatacctgtcgcatcacccacgaccataaacgtcctggcccgcgcgtcggcggccagttcgtcgttaaagaaccgcaatacggtctggttgtggtgcgggatatccgatcccagtacgtgtatcagtgctgtcatgcccgtttacgccagagtaaaaacacgccactacaaagggcgaaataaacaatataagtggccatatacgcctgcgccgcgccaagtgcgccgtgcgccggaataagccagtgtgaaaatgcggtcagcagcgtgaactggctgatttccgtcagaatataaaaacgcaatgatgctttggcgatcaccagatagccgtagacgtaagcgccaacttttaaaacatcgcccaccaactgccaggcgaacaggtcacgcatcgcggtgaagcgcgcggaaaacagtaaccagatggcaaaatcgcgcagcagccagaccgtcagactcgccgccgccaccgccggcaggacgaatttcaatgacttcactatttcacgcgtgatgtctgttttggcactcagccgcgacaacgtcggcagcagatacacgctaaaggaagcggtaataaactgcaggtaggcatctgagatgctgctcacccctgccagataccgaccgcctcccagccgtaatgcgccgccagcagattacgcatcatcacataggccaccggcagcgtcaccgaggtaatcagcgccatcagggtaaatttcgatagctgccccgcaagcccgttatcccaacgcggacgtagcgcgctcagcgggatcgcgccgcgccgccatagcataatggcggccggaaccaccaccagcgcggggactaacgccagccctaacagcgctccctgataaccaccgaagtagtaacaggcgtaataggccgcaacgccaatcaaactcccggcaatcagcgaaaaagcgttacccgccgcatcgcgaaaacctttcatcagcgccagcagatagttggcccaggcaatccccatctgcaccagcgccaccagacgtaccagattctggtagtgcgaatggccgaacagcgcctggcttatgggcgccgccgccagcaaaaagaccagcgccagcagggtagaaaaaccgagcaccattgatgacgaggttccgaccacctgcttcaggcgtaacggatcgtcgtgatgttgggcaaccagcttagtgacgccattaaaaatcccggcgccagccagtacgccaaggacggtgaccagttgccggaagttaccggcctggcctacgcccgccgggccaaatgagaccgccagcagctttaccaccagcagaccggcgcctattttgactaacgtggacgcggcggtccacagtgacgcttttgccaacgacatatcaggagaagtagctcagcagtgaattaatcaccgtccgttggtttaccgcagacaggttgtagaacagcggcaaacgcagcaggcgttcgctctcctgggtggtataacgatcttcgccgcagaactcgccgaactgttcgccagccgggcagctatggagcggaatatagtggaacaccgccagaatttctgcctctttcaaccagttaatcagcgccgcgcggtcatcgttatcccgcagcttaatgtaaaacatatgcgcgttttgcccgcaatccgccggcaccgccggcagatcgatccggcccgcgcgcgccagcggcagcagtgcgtcataataagtttgccacagcgtcaggcgctgctggttaatccgctcagcggcttccagctgcgcccagagataggcggcctgcagatcggacatcaaatagctggaaccgatatcgcgccaggtgtacttatccaccaaaccgcggaagaactggctacggttagtgcccttttcgcgaatgatttccgcgcgttccaccagtttacgatcgttgataagcgttgcgccgccttcaccaccggcggtgtagtttttcgtctcatggaagctaaagcagccaatatggccgatggtacccagcgcgcggcccttataggtggacatcacgccctgcgcggcgtcttccaccacgtacaggttatatttggcggcgagcgccatgatggtgtccatctcacaggccacgcccgcataatgcaccggcacgatcgcccgggttttatcagtgattgcggcttctatcagcgattcatcaatattcatcgtatcgcgacggatatcgacgaagacgattttcgccccgcgcagcacaaaggcattggcggtggaaacaaaggtatagctgggcatgatgacttcatcgccaggctgaatatccagcagcagcgctgccatctccagcgacgcggtgcatgatggcgtcagcagcgccttagcggtgccgaagcgctgttcaaaccactgctggcagcgacgggtaaaaccgccgtcgccgcaaagcttgccgctgttcatcgccgattgcatgtaatcgagctcagtccccaccaccggcggtgcgttaaatggaatcatcgtgtcacctgtataaccagtacgcggtgctttccacattcgcaccgctgagaatataacgtttaagcgcggcggtgttgcccatttgggtcgccacccgcagtgtagaaagcccgcgttgcgccgcccagtggcgcgccgcctgcataagctcggcgccagcgccgcgcccggccagcaggccgatacgcgcgtcgctgtcgttgagctgacgcaaagaaacaaatgcgcggatgtcgccatcgggcgcgcgaaataacagacactggtggtcaaaggtccccagcaccgcgttttcaatccattgcgcgtagaatcggccgctggcgtcagcggcgtaccatggagcgcgaaaacggctcatcgcaaaggcctgtgccgccagttcgcgcagtcgcgcaatatcgccttcaacggcccattcggcgccggcatcagctggctcgcccaccggcaacgccagatcgatctcgccttctaccagttgaaaaccgatctcctgtagcgcatccagccgggcggtgtcgctggcggcgactttcgcctgcactcgcgcccatcctgccagggattcagcggtgagcagcggcgcgcgctcgtcaaagcgaacgatgccgctattaacggcgaagaagcggttttcccactccagcgcttcaatactggcgcgggcgggcacggaggagatccagcaagtattggccatagccggttttttccagccgcttcgcggcgcgtttgacgccgtcatcgtcaagccagccgttacgccaggcaatttcttccagacaggcgattttaaaaccctgccgcttttctaccgtctgcacaaacatactggcttcaatcaggctatcgtgcgtgccggtatccaaccacgcaaagccacgcccaagcagctcgacggttaacgcgccatcctcaagatacatctggttgatggaggtaatttccagctcgccgcgctcggacggtttgacccgtttagcgtactcggccacttttccatcgtagaaataaagcccggtgaccgcccagttcgacttcggttgtttcggcttttcctccagcgacaaggcgcggaagttgtcatcaaactccaccacgccgaagcgctcaggatccatcacctgataaccaaataccgtcgccccttcggtgcgggttgcgacgctacgcagcttagggctaaagctctggccaaagaagatattatcgcctaacaccaggcacgccggttcgccgttgagaaacgcttccccaataataaacgcctgagctaaaccatccggcgtcggctgaacggcatagtgcaattggataccgaactcggaaccatcgccaagcaggcgttggaaatcgcgctgatcttccggcgtggtgatgataaggatttcacggatcccggccagcattaacaccgacagcggatagtaaatcatcggcttgtcgtaaatcggcaatagctgtttcgacacgccgcgcgtgatgggatgcaggcgcgtaccggaaccgcctgcgagaataatacctttcatcatgccctcctgggccagttagccgtgcagcccaagacgctcgccctgatagctaccgtcctgaacctgtcgccaccatgcctcatttgccagataccactggacggtcttgcgcataccggaagtaaaggtctcatccggcgtccagcccagctcccgtgcaatcttcgccgcgtcaatcgcataacgcagatcgtggcctggccggtcagcgacgaaagtaatcagatcgcgataatgcgccacgccctgtggtttatgcggcgccagctcttcgagcaattcgcaaatggtttccaccacctcgatgttttttcgctcgttatgaccgccgatattgtaagtttcgcccggctcgccgcgtgtcgccaccagatacagcgctctggcgtggtcctcgacatacagccagtcgcgaatttgttggccgttaccgtaaaccggtagcggttttcccgccagcgcgttgagaataatcaacgggatcagcttctccgggaagtgatacgggccgtagttattcgagcaattagtgataagcgtcggcaggccgtaggtacgctgccaggcgcgcaccagatggtcgctgctggctttcgaggccgaataagggctgcttggcgcataaggcgtggtctcggtaaagaaatcatcgctgccatgcagatcgccatacacttcgtccgtcgagatatgatgaaagcgaaacgccgatttttgctccgccgccagcgtattccaccagctgcgcgcggcttccagcagcgtataggtaccgacgatattggtctcaatgaacgccgccgggccatcaatggaacgatcgacatggctttccgccgcgaggtgcatcaccgtatcgggttgatgctggcggaagatgcgatccagctcggctcggttacagatatccacctgttcaaaggcaaaacgcgcatcctgcgccaccggcgccagcgacatcaaattgccggcgtaggtcagcttatccacaacaacgacgcgatcggcggtgtgctggatgatttcacgcactaccgcggagccaataaagcccgcgccgccggtgaccagaatcgttctcaccgccacactcctttggtgtcgatgatgtaggcctgggtaacgctatcgccgctaacggctttaaactcgttgtgatcgaccagcatcaccaacacatcggcgctcgccagcgcatcatcaagggtcgccagcgtacacaggccatcaagcttcttcggcagcgtgtgaatgttgggctcaaccacctgcgtcgcgccgctgtgccagcgggcgatctgcgcggcaatttccatcgccgggctttcacgtaaatcatcaatgttaggcttaaaggccaggccgaagcaggcaatagtcagttcgctggcgcgtttattgctggcattcaggcactcggcaacctgtgctttcacccgatcgataacccattccggcttgtggtcgttaacctcccgcgcggtgcgaatcagacgcgcctgctgcgggttttgcgccacgataaaccacgggtcgacggcgatacaatggccgccgacgcccggacccggctgcagaatattgacgcgcggatggcggttcgccaggcggatcagttcccagacgttgatcccctgatcggcgcaaatcagcgacagttcgttagcaaaggcgatgttgacgtcgcggaagctgttttccgtcaacttgcacatttccgcagtgcgcgagttcgtcaccacgcattcgccttcgaggaaaattttatacagctcactggcgcgcgccgagcagaccggcgacataccgccaataacgcggtcgtttttgatgagctcaaccatcacctgccccggcagtacgcgctccggacagtaggcgacattaacgtcagccgcctcgcccacctgctgtgggaagctgagatcggggcgcatcgccgccagccactcggccatctgttcagtcgaaccgaccggcgaggtggattccaggatcaccaacgcccctttcttcagggtcgggcaatagatttagcggcggattcaacaaaggccatatctggctcatgcccgcctttaaacggcgtcgggacggcaatcaggtaggcgtcagactctaccggcacggtggtggcgcttaaatatccctgttcaaccgccttttttacgacgctcgctaaatccggctcgacgatatgaatctcaccacggttaatggtctcaacggcgtgttgattgatgtccacgccaaccacccgccgttgccgggaagcaaatgcggcagcggttggcagaccaatgtacccaaggccaatcactgaaatggtagaaaaactcatagcgttacctgattatttttaagagcggataaaatacgatcgcatgcctgaccatcgccgtaagggttatgggcccgactcattgcctgccaggcggcatcatcctgcagcagacgggtgacttcatcgacgatacgctgcctgtcggtgccgaccagacgtacggtgccagcggcgaccgcctccgggcgctccgtcatttcgcgcatcaccagtaccggtttcccaagcgacggcgcttcttcctgaatcccgccggaatcggtcagaatcagccacgcgcgattcatcagccagacgaacggcaggtaatcctgcgggtcaattaatttcacgttagcgacatggccgagaatacggttaaccggctcgctgacgttcgggttcagatgaaccggataaacaatctgtacatcaggatgatggctggcgatatccgccagcgcatggcaaatgtgctcgaagccgagaccaaagctctcgcgacggtggccggtcaccagaattaatttcttatcctcttcgaggaacgggtagcgctgcatcagttcattgcgcagcgcctcgtcgccaaggacacgatcgcgaacccagaacagcgcatcgatcaccgtattgccggtaacggtaatgcgttctgcgtcaatattttcccgcagcaagttatcgcgcgaggtagcggtcggggcgaaatggtacatcgccagacgtccggtcagcgtgcgattgccctcttccggccacggcgaattcagatcgccggtacgcaggcccgcttccacatggcccaccgggatacgctgataaaacgccgccaggctggccgccatcgtcgtcgtggtatcgccgtgcaccagcaccacgtccggcttaaacgactccagtaccggctttaaaccttgcagaatacggcaggtgatctcggttaatccctgacctggctgcataatgttcagatcgtagtccggcgtaatcgaaaacagtttcaacacctgatcgagcatctcccgatgctgcgcggttacgcaaacctttgcctcaaaatgaggatcctttgccagcgcatggaccagcggcgccatcttgatggcttctggtctcgtgccaaatacagttagtactttcacatcgattctcttcgattaggtgatgatggcgcggagccttcatcacaggccccattcactggacacgacgacgtgctaacgccacgcctgcgccgatgagcgcgcccacaatcccccacatgatcatcagaaatactcgccgcgggctatcgcgttttacaggttcttccggcgtacgcaaatatctgtaagtctgaaaacgtggatccagcgtcgggccaacgttcagcgtattcagcatggcgcggttttggtcatagtcgagatcgtattccggccctacggcctgcaggttttcgaggcgcgcctgtagcatcggccggccaagtaagaagagttcggaggccggcagctgttccgccggaacatcggtctcgctgcgggaaatattatgctgctgggcgattttcaacgcctgctcgacgctctgcacgcggcggttgtagatttcgcttgccacctcttcctgacgcttcacctgcgctttcatctgtacggtacgcgccgcccaagcgcccttcagctcatcattaagatgaccggcggcacgctgactggcgaaagcgacgtattgacgcagcagattattggcatctggcgcggtctccgccgtcagcttgatgctgtcattgacgcttttcagcgggtcgcccgggataaactgaatatcgttaatcagatcgtcaagcatcgcggcatccgcgcgtgagttgcctgactggcgctgcttgtagtaatcggtctgcagccagaagtcacggcgggtatcccatgacgcctgttgcataataaactctttatatgcctcatccatggcggaaggttggtctaccgaagccagatcggctttgatatccaggttacgtaagaactgctgttgcgaatagtatccgcccagcatattgacggtcggccggtcggtaattgccgtcgcgctccactcctggcgagcaaaaaaggaataaataagaacgatcagcgcgaatagcacggcgatgccgactatccagccttttcctgcccataaggcgcgaaacagcccgcgaatatccagttcgttctcaacgttcactgcttgtgctcccggtaatggttgagtcatcacttccccagttttacttggttaaatttggattattgccgctgtgtcgccgaattctgcgtctaatgcgcttaaccagacgcgccactttccatgcgcgcttaatgcagtagccataaagtaaaaaagcaaacaaaaagagtattaacatcacccattcaggaacaatacgggtgtattccgccactacgccgaccagcgccagtaaagcggcagccagcgtaatcaggacaaaggcctgccgggaagtaaacccggcacgcatgatcaaatgatgaatatgctgacgatctggcgagaacgggctcatcccctttcgcaggcggcgatacataatcgccaccatatccatcagtggaatcgcaataatccacagcgccgtcaccgggctgatgggatgcgttttgccctgcgtcgtctccagcaggatccagataatggtgaagccaatcatggtactgccggcatcacccataaacactttatagcgacgtccaagcgcgccaagattaagtaaaatatagggcagaatggcggcgatcatcgcaaaacaccacatcgccaggctgtactggccatcaaaccataagatgatgccggttgccgcgaaggagacggacgaaagcccgccgagcaacccgtcaatgccatccaccatattgaaggcgttgattgccgcccaaacggcgaaaagcgtgaggaaaaaaccaaaggggccgaggactaactcccacgaaccgaaaatataaccgaggctgctgagatgcagattacccgccgtcatcatgataacggctatcgcggcctgaataaccgcacgaatttttacgctgatatcaaatcggtcatccaacgcgccgaccaacaccagcacccccgcgcaggccagatacagcgtggcatgagggatataataatcggcaatcgcaaaggtaaaacaaataccggcataaactgagataccaccaactaacggaatcaaaccttgatgccgtttccgatagtttggcttatccactaacccaatttttttcgctgctttacgggcaacaaatataaacagggtcgtgaataagaaaacactgattaattcagtaatagcagtgagtaaattcacaacacatgtgctctcagcatagttaatccggggagtataacgatgatgtctccactcctgaaggggaaaagcagaacattacaaatttattgtatatattttagactgttaaagtccttcctgcttcacccgccgcgcatatcatacgtcaacgctggcggtgcttttcccgcctggatcatacaaagctacaaaacaaaacgccacgctatcgcgtggcgttttttcggcgtattccgtcctacgaacgcttcatcatatcgaagaagtcgtcgttagttttggtcatcgccagcttgttaatgaggaactccattgcgtcgatttcacccattggatggatgattttgcgcaggatccacattttctgcagttcttcctgggttgtcagcagctcttctttacgggtaccggaacggttgtagtcgatagccgggaagacacgtttttccgcaatcttacgggagaggtgcagttccatgttaccggtgcctttaaactcttcgtagataacttcatccattttagagccggtatcgacaagcgcggtagcgatgatggtcaggctgccgccctcttccacgttacgcgccgcaccgaagaaacgcttcggacgatgcagggcgttggcgtccacaccaccggtcagcactttaccggaagccggaaccacggtgttgtaggcacgagccagacgggtgatggagtcgagcaggataataacgtcttttttgtgctcaaccagacgtttcgctttctcgataaccatttcggcaacctgcacgtgacgagatgccggttcgtcgaaggtagaagcgacaacttcacctttgaccagacgctgcatctcggtcacttcttccggacgttcgtcgataagcaacaccatcagcacgcagtcaggatggttgtatgcgatgctctgcgcgatgttctgcagcagcatggttttaccggctttcggcggcgcgacgatcaggccacgctggccgcggccaatcggcgatgccagatccagtacgcgagcggttaagtcttcggtagaaccattaccacgctccatacgcaggcgtgaattcgcgtgcagcggcgttaagttctcgaacagaatcttgttacgcgcgttttccggcttgtcatagttaacttcgttaactttcagcagcgcgaagtaacgttcaccctctttaggaggacgaatcttaccggaaatggtgtcaccagtgcggaggttgaagcggcggatttggctgggggatacgtagatgtcgtctggaccggcgaggtaggagctgtctgctgagcggaggaatccaaatccatcctgcagtatctccagtacgccatcgccaaagatatcttcgccactctttgaatgctgcttgaggatggcaaaaataatatcctgcttacgcatacgagccaggttttccagccccatattttcgccgagagtaatcagctcagaaaccggcgtattctttaattcggtaagattcatagtggtgtgggttcttaaactcggggtaaatctcgaacttaatgttgtgaatggtatggcaggaacatccatgcctgttagcggcttcatctcgtgtctgtacgttgcctggtcacaggaaagaacgcagaactgaaacgacaagacggaatgagtgataagcccggaattattagcctcacgcgcatagtctgcgggacgctttgggtaaaacaagattcaaacaataggtatgtttaaaacgaagtctggaattaacttagcacgactaaggccgggcgtccagagttccacaaaaaataggaatccggacgccggaatggcaaaccgattacgccaagttggcgtcgaggaactctttcagttggcctttggacagcgcgccgactttggtcgccgcgacttcgccgtttttgaacagcagcagcgtcgggatgccgcggatgccgtacttcggcgccgtgcccgggttctgatcgatgttcagtttagccacggtcagtttgccttgatactcttcagcgatctcatccagaatcggggcgatcattttgcacggaccacaccactctgcccagaaatcgacgagggtcagcccgtcagccttgagtacgtccgtgtcaaaactgtcgtcagtcaggtgaataattttatcgctcatatataactccacaggaataagcctggtgtgttggtgtcgcagtcatcaacgacgtgttgatgctacgttatgcacgctattcttcaggatgcctcttttataagctacctgcgggaatggatccaccatggaccaccaccgccgatgcttaagcgcactgtctgcaaatctacctgcggcagatttaccgcccccgttgcgcttagtagtctaagctttccgggatccgttcagtagccggagacgcaccttgaataatttcgtatatcgccaacgaaaggttgacgttatttcaccggatacgctttcttaatgcaatagttagctgatattctaccacactatgagcaaaacacatttgacagaacagaagttttccgacttcgccctgcatccggcagttatcgaagcccttgaaaaaaaagggtttcataattgcacacccattcaggctctcgcccttccgctcacgctggaaggccgcgatgtcgccgggcaggcgcaaaccggtaccggtaaaacgatggcgtttctgacgtcaacgtttcattatcttctctctcacccggccatcgccgaccgccaggttaaccaaccgcgcgcgctgatcatggcgccgacgcgcgagctggcggtacagattcacgctgacgccgaaccgctggcgcaggccaccggtctgaagctcggtctggcttacggcggcgacggctacgataagcagctgaaagtactggaaagcggcgttgatattctgatcggcaccaccggtcgcctgatcgattacgccaaacaaaaccatattaatctcggcgccattcaggttgtcgtgctggacgaagccgatcgcatgtacgatctcggctttattaaagatatccgctggctattccgccgcatgccgccggccactcagcgcctgaacatgctgttctccgccacgctgtcttatcgcgtacgcgaactggcgttcgaacagatgaacaacgccgagtacgttgaagtcgaaccggaacagaaaaccggccatcgtattaaagaagagttgttctatccttccaacgacgaaaaaatgcgcctgctgcagacgctgctggaagaagagtggcccgaccgcgctatcgttttcgccaacaccaagcatcgttgtgaagatatctggggccatctggccgcagacggacatcgcgtcggcctgctgaccggtgacgtggcgcagaaaaaacgcctgcgtattcttgaagagttcacccgcggcgatctcgatattctggttgcgaccgacgtagccgctcgcggcctgcatatcccagccgtcacccatgtctttaactatgacctgccggatgactgcgaggactatgtccaccgtatcggccgtaccggccgcgcgggcgccagcgggcactccatcagcctggcctgcgaagagtacgcgctgaacctgccggcaatcgaaacctatatcggccattcgatcccggtcagcaagtacaatccggacgcgctgatgaccgatttaccgaagccgctgcgtttaacgcgcacccgcccaggtaatggcccgcgccgtaatggcccgcctcgtaatcgtcgtcgctcaggttaatatctatgccatacacgaaatttttcaggatgcgccacggagattatcccgggcaacgaagcccagtcgacacaggagctgcctgaaagatgaagagtatgagttccacctcgctgtatgccgccatcgaccttggctccaatagttttcatatgttggtggtgcgcgaggtggcaggcagtattcagaccctgagccgcattaagcgcaaagtgcgtctggctgcaggcctgaatagcgacaatgcgctctccgcagaagcgatggagcgcggctggcagtgcttacgcctgtttgccgaacgtctgcaggatattccttcggcgcaaattcgcgtcgtcgctaccgccaccctgcgtctggcggtcaacgccggcgagtttctggcgaaagcgcaggaaattctcggctgccccgtccaggtgattagcggtgaggaagaagcccgcctgatctaccagggcgtagcccataccaccggcggcgccgatcagcgtctggtggtggatatcggcggcgccagcactgaactggtgaccggcaccggcgcgcaaacgacctcgttgttcagcctgtcgatgggctgcgtcacctggcttgaacgctacttcgccgaccgtagtctgactaaagaaaacttcgatctcgctgaagcggcagcgcgcgatgtgctgcgtccgatcgctgatgtcctgcgttaccacggctggaaagtgtgcgttggcgcttcaggcaccgtacaggcgctgcaggaaattatgatggcgcagggaatggatgagcgcatcactctcagcaagctacagcagctaaaacagcgcgccatccagtgcggtcggctcgaagagctggaaatcgaagggctgacgctcgaacgcgcactggtttttccgagcggccttgccattctgattgctatctttagtgaactgaacattcagtgcatgacgctggctggcggcgcattacgcgaaggtctggtctacggcatgttgcacctttctgtcgatcaggatattcgtagccgcacgctgcgtaatattcagcggcgctttatgatcgatactgaacaggcgcaacgggttgctaatctggccacccatctggttgatcaactggacagcggctgggagctggatccgctaagccgcgatttactcgtcagcgcctgcgcgcttcatgaaattggcctgagcgttgattttaaacgtgcgccgcagcacgccgcctatctggtcaataacctcgacctgcccggcttcaccccggcgcagaagaagctcatcgccacgctgctgctcaaccagactaacgccatcgatctttcttcgctccatcagcaaaacgcggtaccgccacgcgttgccgaacatttgtgtcgcctgctacgactggcgattctgtttgccagccgccggcgcgacgatctcctgccagccattcaacttgccgccgacgacgaaaaactgacgctgacgctaccggatgactggctgaaggaacatccgctgggccgggaaatggttgagcaagagtgtcagtggcaaagctatgttcattgggtgctgttgatcaacgacgacgcggcgaggtaatttccggccaggagggcgcatgcgggaagaactggatttcaaatcactacgctttttctccgcgctctaccgtttggggaatgtttctccggcggcggaagcactcgatatcagtcagccaaccggtagcctactgctaaaaaagctacgcgagcactttgacgacccgctgtttgtccgcgttggacaacgcatggcgccaacgccgcgtgcggacgctatcgcccccaccatttttactcttttgcaattggccgattccaatctggcggctaagccggaatttatcccacaagagagcaagcgtaacttcaccatcggcatgaccgatatcagccagatgacgcttcttcctttgctgcaaagccagctccagcggctggacgccagcggcatcacctttacggtgctgaatattgacgatcaaacgcttagcgcgctggaatcagggaaatgtgatttggcgatcggctatcttacccagttgccggatagcgtctatcagcagcatctgttcgatcagtcgtatgtttgtctggcagcggacaatcacccgcgcattcgtcatcggttcagcgccgaagactggcgtcaggaaaaacaccttgcggttcgcgtcaacggcaccgctcacggtgatattgataaactgctcgcggaacacagtatgccgcggcgcatcgcattgacgctgcccagctttttaggcgcgggcgagctggttgccggcagcgagatgatcgcggtggtgcctgaacagctggcgcgccacatcaccaggcgttacccctgccgcagctggccgctgcctttctcactggctaacatcgcgattcgccaggtctggcaccagcgtctgcaccgcgatcctgggcatatctggctgcgcaagcagattgtagatcttgccgcctcaggcggttctattagcatttaaatcataaaataatcggctgtattagtatttctgatacgccatattctatttggtttattgctgtcaatacgtcaaacattttaatctcgtcgcatcagttcatatcgaccgaataaataaaggaacctatcatgcgcggaaaaatcgctttagaagaacatgtatctactcctgaaaataaccgtttatgggattcaagcggtgaggccgggcgtaacggcacggaatatatgaaagatgtagagcgccgcctgcttgaccgcagtattcaactcgaagaaatggcgcaacgtaatattgaccacgttattctttctctgacttcacccggcgcgcaatctattttagataaagccaaagcggtctctttcgctcacgacactaacgactttatcgttgataattatgtaaaaccgaatccggataaatttagcgctttcgccacgctggcgttacaaaacccggaagcggcggcggaagagctggaccgcgcggtgaaaaaactgggcatgaaaggggcgctgattaacggctataccaacgtcaaagacagcgaacatggcctgtatcttgatgatgaatccatgctggtattctgggataaagtaaacgagctaaacgtgccggtgtacctgcatccgcgtgaaccgctggaaggcccggcgcgcgggatttataccggttacgaaagcctgatcggttccgcatggggctttgcgcaggaaaccgccgttcatgccattcgcctgatgatgagcggcctgttcgaccgttatccaaaccttaacctggtgctgggacacctcggtgaagggctggtacacatgctaccgcgcactcaacatcgcctctatcgtcagcgtttcggctgcggtttgggcaaggcggaaaaaccgttaatgcactatctgcaaaataactttattgtcaccaccagcggtcattttaatactcactcgctaaataatgcgattgaggtgatgggcgccgatcgcgtgatgttctccgtagattatccctatgaagatattcatcaggcctgcgactggtttgatccgttagaaatggaaacggggctgaaagaaaaaatagcatggggcaatgccagccgcgtatttaatatcaaataataaagaagaaatcgacagggcctgttctcaggccctgattttattacagggagaatatagtatgccggtaggtatttttgtttgcagcggttcattactcgtcggcgcgattgcaggcgcctcactcaaccgatttatcccggatcactttaagaaaacgctaccgcttatttccgggttaatctctatcagtatgggcgtgttcttccttaacaaactcatcaatctgccgcccattgcgctggctgttatcatcggcacgattattggcggcctgttgaatattgagaagtggattgagcgggcgggaacacagctacgaacgcccatcgagcgcatttttccaggccaaaacaacgcaggtgtagaagccggggattttatgaaccagtttatcgcggtgctgatcctgttctgcgccagcggtaccggtatttttggcgccctaaccgaagggatgaccggtgacccgaccattctgctgaccaagtcgatactcgactttttcaccgccgccattttcgcttccacgttaggctacattatcaccgcgatttttattccccaactgatcatcttcgtgatcctgttcttcgccgccacgtttattatgacgttgataagcccatcgatgatcgctgattttactgcctgcggcggtattattatgctggcgaccggttttcggctttgcggtattcgccatttccccaccgccaacatgctgccgtcgctgctgctggtgatgccattttccaccgcctggcagcagtttgtcgcctgaaacgttagccctttttcgccttcgccagcatcgccttgatattcgcgacgttggcctggcctttatgcatacgttcttccgcagagatgactttccgctcctgctcccaaatcagatcgtcttgcgggagctcaagcagaaaacggctcggctccgggcgcaccagctcgccatactgacgacgctctttgcacagcgtgaaagtcagctctttctgcgcgcgggtgatacctacataggccagtcgccgttcttcatcaacattatcttcatcgatactgctctgatgcggtagcaatccctcttccattcccaccaggtaaacatacgggaactccagaccttttgaggcatgcagagtcatcaactgcacctgatccagctcttcatccgattcgccgcgttccatcatatcgcgcagggtaaagcgggtgacgacctgcgtcagcgtcatcggctcgtctatctcgctgccttccagcatctcggtcatccaggtgaacagctggttgacgtttttcatccgcatttccgcggctttcgggctcggcgaggtttcatatagccaggactcataatcaatcccgcgaattaaatcccgcacggcattgaccggttcacgctcggccagttgctgaatttcccgcagccagtgggtgaaacgagtgagggattcatatccgcgcccggtcagcgtctggcttaagcccatatcaaagctggcggtgaataagcctttattgcggctcatcgcccattcgcccagcttttgcaaggtcgccgggccaatctctcgcttcggcgtattgacgatgcgcaggaaggcgctgtcgtcatccgggttggtgagtacgcgcagataggccagcagatctttaatttccggacgcgagaagaacgaggtgccgcccgagattttgtacgggatgcggttctgcatcagcatcttttcaaagacccgcgactggtgattgccgcgataaaggatggcgtaatctttgtagttggttttattaataaagtggtgggcaatcagttcgccagcgacacgctccgcttcatgatcttcgttattggcggagagcactttcagctcggtaccgtagccaagttctgagaacagccgcttttcaaagacgtgcgggttattggcgatcaaaatgttggcggccttcagaatacgccctgatgaacggtagttctgttcaagcttgatcacctgcagcgccggaaaatcctggcttagcagcaccaggttctgcggccgcgcgccgcgccacgagtagatcgactggtcatcatcacccaccacggtaaagcgcgcgcgctgccccaccagcagcttcaccagctcatactggctggtgttggtatcctgatactcgtccaccagcaggtaacggatcttgttctgccagcgttcgcgcacctcttcattacgctgtagcagcagcgtcggcagcaggataagatcgtcaaaatcgaggacgttgcaggccttcatatgcgcatcatagagcccatagcagtgggcgaagatgcggtcccgttcgcctctcgcgccagcggccgcctgcgctggcgttttcagatcgtttttccagttggagatcgtcgagatcagctgctgcaacaccactttgtcatcttcgatcaacccttcggtgagctctttgagcagcgcgacctggtcagtatcatcgaacaaggaaaagttagatttcattcccagcgcggcgtattcacgtttgatgatatccagccccagggtgtggaaggtggaaatcatcagcccgcgcgcctctttacgccccagcgtttgcccgacgcgctctttcatttcgcgggcggccttgttagtaaaggtgacggccgcgatatggcgcgcctgataaccgcagccgcggatcaggtgggcgattttattcgtaataacgcgggtcttaccggaaccggcgcccgccagcaccaggcacggtccggtaacgaattcgacggcttgttgttggccagggtttaaacgcatgggaatattgctcaatcttcgaacggggtgtggattgtagcagaaagcgaggccgagatttaccggctgatggtaaagtgtcagccacgcaattcatcctgaggctccggttatggcaaaaagcgcagcggccctgcatattctggtcaaagaagaaaaactggcacacgacatcctcgccaagcttgaacggggcgtcagcttcgatcatctggcgaagcgctactcaaaatgcccgtccggacgtcatggcggcgatctgggggagttccagcagggcgcaatggtcgctccgtttgataaagccgtgttcagctgtccgctgctcaaaccctatggcccggtacaaaccaaatttggctaccatatcatcaaggtgctgtatcgccgctagcgcgtgttactatgacgccctgatttatcccaactcaatcaaggcgcaatcatggctaaaacagcggcagcactgcatatcctggtaaaagaagagaaactggctctcgatctgcttgagcagcttaaaaatggcgccgacttcggcaagctggcgaaaaaacactctatctgcccgtcaggaaaacgtggcggcgatctgggtgaattccgccagggccagatggttccggcattcgataaagtagttttctcctgcccggaactggagccaaccggcccgctgcatacccagttcggttaccacatcatcaaagtgctgtaccggaaataataaaaaaacccggggatcttaatctccgggtttttgcctgatggcgcttcgcttatcaggcctactaaacaaatccattcctctatggatttcggtttgccggaaggcggcaaggaagtacatccccaggaacatagattcctatgtgactggggtgtacgtaccgtagccaacgcatcggcaagtcgaaagacgacgaggaatcagccggcaaccgcgatacgcttcatatcggtcatataaccgcgcagttttttacccaccgcttcgatagcgtggctgcgaatcgcttcgttcacgtcgcgcagctgagcgttatccaccgcgccttcggcaatcgctttgcccaggtcgccggtctgcagagtggtcatgaactctttcagcagcggtacgcaagcataagagaacaggtagttaccgtactctgcggtatcggagataaccacgttcatttcataaaggcgcttacgggcgatagtgttggcgataagcggcagttcgtgcagcgattcgtagtaagcggactcttcgatgatgccggaatcaaccatggtttcgaaggccagctcaacgcccgctttcaccattgcaatcatcagaacgcctttatcgaagtactcctgctcgccgattttaccttcatactgcggcgcggtttcgaacgcggttttaccggtctcttcacgccaggtcagcagttttttgtcgtcgttcgcccagtcagccatcatgccggaagagaattcgccggagatgatgtcatccatatgtttctggaacagcggcgccatgatctctttcagctgttcggacagcgcgtaagcacgcagtttcgccgggttagacaggcgatccatcatcagggtgatgccgccttgtttcagcgcttcggtgatagtttcccagccgaactgaatcagtttttccgcgtaggccggatcggtaccttcagccaccagcttatcgaagcacagcagagaacccgcctgcagcatgccgcagaggatggtctgctcgcccatcaggtcagatttcacttccgccacgaaggaggattccagaacacccgcacgatggccgccggtcgccgctgcccacgctttagcaatggccataccttcgcctttcggatcgttttccgggtgtacggcgataagcgtcggcacgccgaaaccgcgtttgtactcttcacgaacttcggtacccgggcacttcggcgccaccatcaccacggtgatgtctttgcggatctgctcgcccacttcaacgatgttgaagccgtgggagtaacccagcgccgcgccgtctttcatcagcggctgtacggaacgcacaacgtcagagtgctgtttgtccggcgtcaggttgacaaccagatcagcctgagggatcagctcttcataggtacccactttgaagccgttttccgtcgctttacgccaggatgcgcgcttctcggcaatcgcttctttacgcagcgcataagagatatccaggccggagtcacgcatgttcagaccctggttcagaccctgcgcgccacaaccgacgatgactacttttttaccctgaagatagctggcgccatcggcaaattcatcgcgccccataaagcggcatttgcccagctgagccagctgctggcgcagattcagtgtgttgaagtagttagccatggtgatacctcgtgatgttgtgttgtcgtgcttattgttcggttcgcgttttgcgagaatgaacccactatatgacaggaatttcgttgcgaaaattgatatattcacaacatcacattgcaataactgcaacgttattttcaggggattgagccatggatttacgcgatctgaaaacctttctgcatctggcggaaagccgccattttggccgcagcgcgcgggctatgcatgtcagtccctccacgctttcgcggcagattcaacgcctggaagaggacctcggccagccgctgttcgttcgtgataatcgcaccgtgaccctaaccgaggccggtgaagaactccgcacctttgcccagcagaccttattgcagtatcagcaactgcgtcacgccatcgatcaacaggggccatcgctctccggcgagctgcatattttctgctccgttaccgccgcttacagccatctgccgccgattctcgatcgctttcgcgccgcgcatccttcagtagagataaagttatcgaccggcgacgccgctgatgcgatggaaaaagtggtcactggagaagccgatctggccattgccggtaagccggagacgctgccaggttcggtggcattttcgatgctggaaaatcttgcggtggtactgattgccccggcgttaccctgcccggtgcgcaatcaggtgacggtcgagcatcctgactgggcaacggtaccgtttatcatggccgatcaggggccggtgcgccgccgcatcgagctgtggttccgccgccataaaatcagcaatccatccatttacgccaccgtcggtggccatgaagccatggtatcaatggtcgccctcggctgcggcgtggcgctactgccggaagtggtgctggaaaacagccccgagccggtacgtaatcgcgtgatgatcctcgatcgcagcgatgagaaaacgccatttgaactgggcgtctgcgcacaaaaaaagcggctgtacgagccgcttattgatgctttctggaaaattctgcctaaccactagcccgcgaggaaaaaacggaacgccgggttatgagtttcgtcatgacactcgtagcccagttcattaagacgggtttcgaagtccggctcatgctcgccaagctcaaacgccgccagaacgcggccaaaatcggtgccgtggctacgatagtggaacaacgaaatattccagtgggtgccgagcgtgtgcagaaacttaagcagcgcgccaggtgattccgggaactcgaagctaaacagacgctcctgcagcggtttagacggccgtccgccgaccatatagcgcacgtgcagtttcgccatttcgtcatcggaaagatcgaccacgctgtagccgccttcgctcagtaaatcgaggatctctttacgctcatccagcccgcgactcaaccgcacgccaacgaaaatacaggcatctttggcatcggcaaaacggtagttgaactcggtaaccgaacggccgcccagtagctggcagaacttaagaaaactacccttctcttccggtatcgtcaccgccagcagcgcttcgcgctgctccccgagctcgcaacgctcagaaacgtagcgtagtccgtggaagttaacgttggcgccggacaggatgtgagccagacgctcgccgcggatgttatgctgggcaatatactttttcatccccgccagcgccagcgcgccggagggctccgctaccgcccgcacatcttcgaacagatctttcatcgccgcgcagatagcatcgctatcgacggtgatgatgtcgtccagatactcctggcataaacggaacgtttcatcgccgatgcgcttcaccgccacgccttcagcaaacaaaccgacgcgcggcagatccaccggatgaccggcatccagcgccgctttcagacacgccgaatcttccgcttcgaccgctatcactttaatctgcggcatcagctgcttgataagcaccgccacgcctgccgccagaccgccgccgccaaccgggacgaatacgcggtcaatgtgggcatcctgctgcagcagctccagcgccagcgttccctgaccggcgatgaccatcgggtgatcgaacggcggcacccaggtaaaaccctgctgctgcgccagctcaatcgcgcgggctttcgcttcgtcaaagttggcgccatgcaatagcacttcaccgccaaagccgcgaacggcatcgactttgatatcggcggtcgctaccggcatcacgatcagcgccttaacacccagccgggatgcggaaaacgccacaccctgcgcatgattacccgccgaagcggtgatcacgccatttgatttttgttccgccgtcaggccggacatcatcgcgtaggcgccgcgcagcttaaaactatgcaccggctggcggtcttcgcgttttaccaggataacgttatcgagacgcgaagagagcttgtccattttttgcagcggcgttttctgcaccgcttcataaaccggcgcgcgcagtaccgcccggagatacaccgccccctcaggggcggcggataggggttgcgactcggccatgattaaccccaagttttgatttatcgcgcacggcgcccttgtcggcactggtcgcgaggctggcgtaagcgcgcagcgcgaaggagacctggcgctcgcggtctttcggcgtccacgccttatcgccacgcgcttcttgcgcttcgcgacgggcggcgatttcggcatcgctgagctgcagttgaataccgcggttcggaatatcgatagcaatcatgtcgccatcttcgatgatcgcgatgttgccgccgctcgctgcttccggcgatacgtggccgatggaaagcccggaggtgccgccggagaaacggccatcggtgatcaacgcgcacgctttgccaagacccatggacttcaggaaggtggtcggatagagcatctcctgcattcccggcccgcctttcggtccttcatagcgaataaccacaacgtcgccttccacgactttgccgccgaggatagcctcaaccgcttcgtcctggctttcataaactttcgccgggccggtaaatttcaggatgctatcgtccacgccagcggttttgacgatacagccgttttcggcaaagttaccgtacagtacggccaggccaccgtctttactgtaggcatgctccagagaacggatacatccctcagcgcgatcgtcatccagcgtatcccagcggcaatcctgcgagaacgcctgggtggtacggatccccgccgggccggcgcggaacatttttttcaccgcgtcgtcctgggtcaccatcacatcgtactgttccagggtctgcggcagcgtcaggccaaggacgtttttgacatcgcggttgagtaaccccgcgcgatccagctcgccgaggatccccagcacgccgccggcgcggtgtacgtcttccatatggtatttctgcgtgctcggcgccactttacacagctgcggcactttgcgggacagcttgtcgatatcactcatggtgaagtcgatttcggcttcctgcgccgccgccagcagatgcagtacggtattggttgagccgcccattgcgatatcgagagtcatggcgttttcaaatgccgccttgctggcgatattgcgtggcagagcggaggcgtcgtcctgctcgtagtagcgtttagtcagttcaacgatacgtttaccggcgttgaggaacagcgctttacggtcggcatgggtcgccagcagagaaccattacccggctgcgacaggcctaatgcttcggtcaggcagttcattgagttcgcggtgaacatccccgagcacgaaccgcaagtcggacaggcggaacgctccacctgttcgctctgatcgtcagagactttcgggtctgccccctgaatcatggcatcaaccagatccaacttgatgattttgtcagacagcttagttttcccggcttccatcgggccgccggaaacaaagatcaccggaatattcaaacgcagggaggccatcagcatccccggggtgattttgtcgcagttagagatacaaaccatggcatcggcgcagtgggcgttaaccatgtactcgactgaatcggcgataagctcgcgggatggcagtgaatagagcatacccccgtgacccatggcgatcccatcatccaccgcgatggtgttgaattctttagcgacgccgcccgcagcttcaatttgctcggcaaccagtttgccgagatcgcgcagatgcacgtgccctggtacaaactgggtaaaggagtttacgacggcgataatcggtttgccgaaatcggcatcggtcatcccggttgcgcgccacagcgcgcgggcgcccgccatattgcggccatgtgtagtggtggcggaacggtacttaggcatgctctttttactcccatctctgtttatgcaatgggacggtgcgtgccgtcccatttttaatcacttacttaccggatccagccagccccatttatcttccgtttcaccggtgaagaggccaaagaaggcttcctgaatgcgtttggtcaccggaccgcggcggcctgcgccaacctggataccgtcaacgctgcgtaccggcgtgatttccgcagcggtaccggacatgaacacttcatccgccaggtacagagattcgcgggaaagcacctgctcgcggacttcgataccgagatctttcgccagtttgatgatggcgtcgcgagtgatacccggcagcgcggaagaggtaaacggcggagtaaacagcacgccatctttcacctcaaacaggttttcgcctgcgccttcggagatatagccgttaacgtccagcgcgataccttcctgataaccatgacgacgcgcttcgctgccgaccagcagagaggagagatagttgccgcccgctttcgctgcggttgggatggtgtttggcgccgcgcggttccaggaagaaaccatcgcatcgatcccctgctccagcgcttctgcgccaaggtatgcaccccacgggaacgccgcgatgataacgtcggttttatagccgtccggcgggttaacgcccatgccaacatcgccaacaaacaccagcggacggatataagcgctggtcagtttattggtacggataacttcgcggcaggcttccatcagctcgtcaacgctctgagaaaccgggaaacggtagattttggctgaatcatgcagacgctgcatgtgttcacgatggcggaacaccactggccctttgtgagaatcgtagcagcggataccttcgaataccgaagtcccgtagtgcaacgcgtgggacatgacgtgtactttcgcctcgccccatggggtcatctcgccattgaaccaaatgtaatcagctttcttcgtcgtcattttttttattcctctgcgctcaggcgcggatttgttgtgatgtgggttgctggatctcgacgcaggcgacgtcgaccagtttgcgtaactgactaaacagtaattcgacgggccgctggctggcaacggtcagctcgatatttatgttttgcgcatccgacgcggtttccatattcattgagcagatttgaaaaccgcggtggcgcaccacgcgcagcacgcgttctaaggtttcggggttgaagcgagcctgtaaagcgacctgatgttgcatcatgataatttctccagcatttctgcattactggcgccgggcggcaccaacggccagacattctcaagttcatcgattgagacatgaagcaggtatggcccctggctcgaaagcatggtgtcgagtgccgcttcaacctggtctttacgggtgatgtgctggcctggaatgccaaaagcgctggccagcgtaagaaaatcaggattatcggtaagcgtggtttcgctgtaacgctcctggaaaaacagctgctgccactggcgaaccatacctaaacgttggttatccaacagcacaattttcaatggtaattgcttgcgcttaacggtgcccagctcctgcacgttcatcatgaaagagccatcgccggaaatacagataaccgtatcgtccgggcgagccacctgcgcgccaacggctgccggcagaccaaaacccatggtgccgaggccgctggaagtgatgaagttttccggacgggtataggtcatgtgctgggccgaccacatttggtgctggccgacatcggtcgtcacgacgcaatccgccggtttgcgatcggaaagctgcttgagcaacagcggcgcgtagattgcctcgccgggatgatcgtaacgccaggcgtgctccgcgcgcagctgcgcgttgtgctcgcgccacgcatcgatggccaacggctgctgcaacgctggcagcatggcgtttaaatctccggttaaggcgacgtgcgcctggcgcagtttgttcagctccgccggatcaatatccatatggataactttggcgtgcggggcaaaggtattcagcttgccggtcacccggtcatcaaaacgggcgccgacggcgattaataaatcgcactcctgcaccgccaggtttgctgccttggttccgtgcatacccagcatgccgagatagtagggataatccgcggcgacggcgcccaaccctttcagggtgcaggtgacaggcatctgcgtcatcgccagaaattggcgcacggccggtaccgcctgcgccattccgacgccgccgcccacgtacagcataggcttgtgggactgcgcaagcatcgctaacgcctgctcgacttctgcgtgagggaactcaacatcatcagggacggtggagaaatgcggatctaattctcctttagccagctggatgtccttcgggatatcaaccagtaccgggccaggacggcctgagtttgccacctggaaagcttccgcaatgacgcgcggcaactcttccaacgactgcacgaggaaactgtgtttggtgcaggccagcgacaaaccgagaacgtccacttcctgaaaagcgtcagtgccaataaacggtgccgccacttgaccggtgatggcgacaacaggtacagaatcaagtaacgcgtcagccaaaccggtgatcaggttggtggcgccagggccggaagtggcgatgcaaacaccagttttgccggtcgcgcgggcataaccgatggcggccattgcggcgccttgctcgtgccgacacagcaggtgttccacgccgccgtcatacaaagcatcgtaaaccggcataatcgcgccacccggatagccaaataccgtgtcgaccccctgtgttcgcaaagcatgtaccacccactgcgccccgttcatagttacttccccgtcatagatcgggagaaacagaattttatgctaaaactcatcttctgctcctcgcttatgttttttaagttataaaaaaaccccggacctttcggtgcgggggtcttagttcgttaaggcttgatttctaagcctttcctcgtccaagtgcagccccgcacggtgggataataatcaccaccacgctaatcacgaccaggctaatcactcgtagaagggctgtcattttctgttctttctggcttcttgttcgaaggaatacctaaagagttaccacagacatcacattaagcacaagatttttttatgttccattttctgatcttgctaacgatttttattaaaccagttgtttttaaaaagaaaaaaataaaatgaaaaaaattcagcttattctcgcgtttgcatccgtgttttacggcattaaaacagcgtcatgacggatttgcgcgcgcacttccaagacaatgaaaatgcaaaattttgcaggtaattgtctggaaaaggcgtcgtaaagttaaatattcccaggttcatgaaaccctatgaatagacataatcattccgctcaggaggcgttatgtcactcgcaattgtctatacccgcgcggcactcggggtcagcgcgccgctaattaccgtcgaagtccatatcagcaacggactacccggtttgacgatggtcggcctgccggaaaccacggtaaaggaagcccgcgatcgggtacgtagcgccattattaacagcggctacagctttccggcaaagaagataactataaaccttgcgccagccgatctgccaaaagagggtgggagatatgatttacctatcgctctcgcgctcctggtcgcttcgcagcagcttgccgcaccgaaacttaatcagtatgagtttattggcgaattggcgcttacaggcgcgttacgcggcgttcctggggcaatatccagcgccatggaagcgataaaagccgggaggcagattgtcgttgcaggagataacgccgaagaggtcggcttgattggcggcaatgagtgcctcacagccgggcacctacaggaagtctgcgcgtttctggaagggaaacatactctgcagccgccggctggcgaaataacggcgggagacgaggattatgacgatctcggcgatgtcattggccaacagcagggaaaacgcgcgctggagatagtcgcagcgggcggtcacaatttactcttgatgggtccaccgggtacaggaaagacgatgctcgccagccgtttgcccgggcttttaccgccgctaagcaaccaggaagcgctggaaagcgcggctatcctcagcctcgtcaatgctcattacgtcacgcgtcagtggcgtcggcggccttttcgcgcccctcaccatagcgcttcgctaacggcgatggtcggcggcggttcaatccctgcccctgggagatctcccttgcgcataacggtattctgtttcttgatgaactacctgaattcgaacgtcgggttctggatgcactacgagagcccattgaatcaggaaaaattcatctttcccgcactcgggctaagattgactatcctgcgcgatttcagttgattgccgccatgaatcccagcccaacagggcattaccagggtcagcacaatcgggccacaccggaacagaccctacgctacctgggccgattatcagggccatttctcgaccgattcgatctctcgcttgaaattccgctccctccaccgggcgtattaagccggggtggcgttggcgaagagcgaagcgccactattcgtctacgggtattagcggcgcgtgacagacagctcgcacggcagaataaacttaatgcgcaactggacagcggggagataaaagtctggtgcaagctgaaagaagacgacgcgatatggctggaacagacgctctcactattagggctttcaatccgcgcatggcaacgtttactgaaagttgcgcgtactatcgccgatcttaatgaggatagggatattgaacgtcatcatttgcaggaggcgctaagctaccgggctatcgaccgtatgttaaatcatctgcagacgctgatggcataaaaaaagggctttcgcccttttttttaatcatcgctttcagtgtagtcttcagcgccttcaacctgcggcttgccgccagataaggtatgaaaacgcttcggacgtttgattcgcgccatatacttaatccaaacgcgttctgcgtcggttactggctcacgttcgccgtggcataccgcaacgaactgtttttcatcttcggtaacaggctcgcgtttgcccaattccagctcattaaaggcgtaaccatgacgttcaagcagttgcgcctctttgatggtgaaatcaccgtgacgggagaacccgcgtggataatttttattgtcgaaaaaacgattagtcgtcgtaaagctttccgccatcctacacgctcctgattctttggccgagctatttatggcgcggagtattagttacgcttgacagagcgtcaaacaaaacatttaaatcatcacgacaaataattttgcggagaagagtgtggacacggaattgctcaaaactttccttgaagtgagcagaactcgccactttgggcgggcagcggaagcgctttatttaacacaatcagcggttagcttccgcattcgtcagttggagaaccaactgggcgtgaatctatttacccgccatcgtaacaatattcgcctgacgtcagccggcgagaaactgttgccctatgccgaaacgttgatgaacacctggcaggccgcgcgtaaggaggtcgcccactcttctcgccataatgaattttcgattggcgccagcgcgtcgctatgggaatgcctgttgaacggttggctgggaacgctctacaaagatccctataacctgcaatttgaggcgcggatagctcagcgccagtcattagttaagcagttgcatgaacgccagctcgatcttctgatcaccactgaatccccgaagatggatgaattaagctgccagttattgggtcatttcactctggcgctctattgtgccgcaccgggaaaaaataagagcgacttaaactacctgcggctggaatggggaccggacttccagcaaaacgaagtgggtttgatcggcagcgatgatgtaccgctgctgacgacgagctctgcagaactggcttatcaacagctcactaccttgaatggttgtacctggttacccgttagttgggcacagcagaaaaccggcctgcacacggtgaccgatagcgcgacgctttcacgtccgttgtatgccatctggctgcaaaatagcgataagcaggcacatattcgcgagattctgaaaagcagcatcctggaatagcgatctgactccatggacggagtgacaaaaaacaggaaaggcagattaagaggagaaattaaagacaaaaaaaatcctttgccgaagcaaaggattatatatggcaggggcggagagactcgaactcgcgacacccggttttggagaccggtgctctaccaactgagctacgcccctaaatctttctcgctattaagcccgctaatatagcaggcttaatataaataagtggcggaacggacgggactcgaacccgcgaccccctgcgtgacaggcaggtattctaaccgactgaactaccgctccaccgaattttttctacatctaccggtttaatgccccggttttactgcaaatttgatgcctggcagttccctactctcacatggggagaccccacactaccatcggcgctacggcgtttcacttctgagttcggcatggggtcaggtgggaccaccgcgctatcgccgccaggcaaattctgttttcaacacgtcctcaggacgcatcgattaatctgtatcaggctgaaaatcgtctcaaatccgccaaaacagcttcggcgttgtaaggttaagcctcacggttcattagtatcggttagctcaacgtatcgctacgcttacacacccgacctatcaacgtcatcgtctttaacgttccttcaggactctcaaggagtcagggagaactcatctcggggcaagtttcgtgcttagatgctttcagcacttatctcttccgcatttagctaccgggcaatgccattggcatgacaacccgaacaccagtgatgcgtccactccggtcctctcgtactaggagcagccccctcaattctccagcgcccacggcagatagggaccgaactgtctcacgacgttctaaacccagctcgcgtaccactttaaatggcgaacagccatacccttgggacctacttcagccccaggatgtgatgagccgacatcgaggtgccaaacaccgccgtcgatatgaactcttgggcggtatcagcctgttatccccggagtaccttttatccgttgagcgatggcccttccattcagaaccaccggatcactatgacctgctttcgcacctgctcgcgccgtcacgctcgcagtcaagctagcttatgccattgcactaacctcctgatgtccgaccaggattagctaaccttcgtgctcctccgttactctttgggaggagaccgccccagtcaaactacccaccagacactgtccgcaaccccgatcaggggccaacgttagaacatcaaacattaaagggtggtatttcaaggttggctccacgcagactggcgtccacgcttcaaagcctcccacctatcctacacatcaaggctcaatgttcagtgtcaagctatagtaaaggttcacggggtctttccgtcttgccgcgggtacactgcatcttcacagcgagttcaatttcactgagtctcgggtggagacagcctggccatcattacgccattcgtgcaggtcggaacttacccgacaaggaatttcgctaccttaggaccgttatagttacggccgccgtttaccggggcttcgatcaagagcttctccttacggataaccccatcaattaaccttccggcaccgggcaggcgtcacaccgtatacgtccactttcgtgtttgcacagtgctgtgtttttaataaacagttgcagccagctggtatcttcgactgatttcagctccatccgcagggacttcacctacatatcagcgtgccttctcccgaagttacggcaccattttgcctagttccttcacccgagttctctcaagcgccttggtattctctacctgaccacctgtgtcggtttggggtacgatttaatgttacctgatgcttagaggcttttcctggaagcagggcatttgttacttcagcaccgtagtgcctcgtcatcacacctcagcgttaaaaaggtaccggatttacctggaacctccgcctacatgcttaaaccgggacaaccgtcgcccggctaacatagccttctccgtcccccttcgcagtaacaccaagtacaggaatattaacctgtttcccatcgactacgcctttcggcctcgccttaggggtcgactcaccctgccccgattaacgttggacaggaacccttggtcttccggcgtgcgggcttttcacccgcattatcgttacttatgtcagcattcgcacttctgatacctccagcaaccctcacaggccaccttcgcaggcttacagaacgctcccctacccaacaacacatagtgtcgctgccgcagcttcggtgcacagtttagccccgttacatcttccgcgcaggccgactcgaccagtgagctattacgctttctttaaatgatggctgcttctaagccaacatcctggctgtctgtgccttcccacatcgtttcccacttaactgtgactttgggaccttagctggcggtctgggttgtttccctcttcacgacggacgttagcacccgccgtgtgtctcccgtgataacattcttcggtattcgtagtttgcatcgggttggtaagtcgggatgaccccnnnnnnnnnnnnnnnnnnnncccgaagatgagttcacgaggcgctacctaaatagctttcggggagaaccagctatctcccggtttgattggcctttcacccccagccacaagtcatccgctaatttttcaacattagtcggttcggtcctccagttagtgttacccaaccttcaacctgcccatggctagatcaccgggtttcgggtctataccctgcaacttaacgcccagttaagactcggtttccctgcggctcccctatacggttaaccttgctacagaatataagtcgctgacccattatacaaaaggtacgcagtcacaccctaaagggtgctcccactgcttgtacgtacacggtttcaggttctttttcactcccctcgccggggttcttttcgcctttccctcacggtactggttcactatcggtcagtcaggagtatttagccttggaggatggtcccccnnattcagacaggataccacgtgtcccgccctactcttcgagttcacaacctgtgcattttggtgtacgggactatcaccctgtaccgtcggactttccagaccgttccactaacacacaagctgattcagactctgggctgctccccgttcgctcgccgctactggggaatctcggttgatttcttttcctcggggtacttagatgtttcagttccccggttcgcctcgttaacctatgtattcagttaacgatagtgcaacgaattgcactgggtttccccattcggacatcgccggctgtaacggttcatatcaccttaccgacgcttttcgcagattagcacgtccttcatcgcctctgactgccagggcatccaccgtgtacgcttagtcgcttaacctcacaacccgaagatgtttcgtaaaacattttcgtgtcgcgaaaatttgagagactcgaacacacattaactgtgtgtcgtttcaattttcagcttgatccagatttttaaagagcaaaacttcgcagtgaaccttttcaggtacactctgaagttttcttgttttttgcagtaaggatggtggagctatgcgggatcgaaccgcagacctcctgcgtgcaaagcaggcgctctcccagctgagctatagccccatcgtagttatctcttttaaccttaattcgttttcgggcgcggcgtggtgaagcgaagcatactgaagtatgcgagctttgccacaacaaagcacgagagcgaatttggtaggcctgagtggacttgaaccaccgacctcacccttatcaggggtgcgctctaaccacctgagctacaagcctgcagagattacttactgctgtattttcatcagacaatctgtgtgagcactacaaaggcaggttctttaaggtaaggaggtgatccaaccgcaggttcccctacggttaccttgttacgacttcaccccagtcatgaatcacaaagtggtaagcgccctcccgaaggttaagctacctacttcttttgcaacccactcccatggtgtgacgggcggtgtgtacaaggcccgggaacgtattcaccgtagcattctgatctacgattactagcgattccgacttcatggagtcgagttgcagactccaatccggactacgacatactttatgaggtccgcttgctctcgcgaggtcgcttctctttgtatatgccattgtagcacgtgtgtagccctactcgtaagggccatgatgacttgacgtcatccccaccttcctccagtttatcactggcagtctcctttgagttcccggccggaccgctggcaacaaaggataagggttgcgctcgttgcgggacttaacccaacatttcacaacacgagctgacgacagccatgcagcacctgtctcagagttcccgaaggcaccaaagcatctctgctaagttctctggatgtcaagagtaggtaaggttcttcgcgttgcatcgaattaaaccacatgctccaccgcttgtgcgggccccgtcaattcatttgagttttaaccttgcggccgtactccccaggcggtcgacttaacgcgttagctccggaagccacgcctcaagggcacaacctccaagtcgacatcgtttacggcgtggactaccagggtatctaatcctgtttgctccccacgctttcgcacctgagcgtcagtctttgtccagggggccgccttcgccaccggtattcctccagatctctacgcatttcaccgctacacctggaattctacccccctctacaagactctagcctgccagtttcgaatgcagttcccaggttgagcccgggatttcacatccgacttgacagaccgcctgcgtgcgctttacgcccagtaattccgattaacgcttgcaccctccgtattaccgcggctgctggcacggagttagccggtgcttcttctgcgagtaacgtcaatcaccaaggttattaaccttaatgccttcctcctcgctgaaagtactttacaacccgaaggccttcttcatacacgcggcatggctgcatcaggcttgcgcccattgtgcaatattccccactgctgcctcccgtaggagtctggaccgtgtctcagttccagtgtggctggtcatcctctcagaccagctagggatcgtcgcctaggtgagccattaccccacctactagctaatcccatctgggcacatctgatggtatgaggcccgaaggtcccccactttggtcttgcgacgttatgcggtattagctaccgtttccagtagttatcccctccatcaggcagtttcccagacattactcacccgtccgccgctcgtcacccgagagcaagctctctgtgttaccgctcgacttgcatgtgttaggcctgccgccagcgttcaatctgagccatgatcaaactcttcaatttaagtttgatgctcgtgaattaaacttcgtaatgaattacgtatgttcactcagagacttggtattcatttattgtccgaagacattaagaatccatgtcactttgagtgcccacacagattgtctgataaattgttaaagagcagttgcaacgcggctttcagctcaccgttgcgaggtcccgtatattacgttttcctcattcagagtcaagcgtttattttcacttttctctgtcggttttcagcgttgttatttaccgctgaaaccctgttgacccggcggcttgcttgccgttgttccgtgtcagtggaggcgcattatagggagttctgagacgttgacaagccctgttttcaaaaaacttttcaaccgtctcttttttcaccaaaggcggtgttaaaaccgtaaaaaatcgcccttttgctgttttaaccaccgaaacaggccgccaggtggcatactgatgaagtagaaaagagaaaggaacggcatttatgtctataagcgcacagcagctggcggcacaaaaaaacatctcctgggtcatcgcggagaagatcgcccaaaaaatcctcaccggcgaatatccgccagagagcattcttcctggtgaaatggaactgggcgaacagtttggcgtcagccggacggcagtacgagaagcggtaaaaacgctggcagctaaaggtatgctgcttccgcgtccgcgtatcggtactcgcgttctggcgcgcagcagctggaactttctggataaagagctgctcgcctggtggctaacggaagataatttcgaagaagtggttagccattttctggtgatgcgcagcagcctggagcctcaggcctgttttctggcggcgataaccggcacctccgagcaaaaagcgcagctcaatacgctaatggaagaaatgatcgaactaaaaaggcattttatccgcgaacgctggattgaagtcgatatggcctggcatgaacatatttatgcgatgagcggcaacccgtttctcacctctttcgcgtcgttattccattcggtatatcagacctatttcacctcgattacgcaaaatgaagtcgttaaactcgatctgcaccaggctattgttgacgccattcaggaaagcgacggtccgcgcgcgcagcttgcctgtcaaacgttgttgaataccccaaaccacaaagataaataaagaaggaaatggcatgaccgggaagaaagggctgagtatggccggactgccgtggattgcggccatggctttctttatgcaggcgctggacgccactattcttaataccgcgcttcccgctattgcgcatagccttggtcactccccgctggcgatgcaatccgccattatcagctacaccctgacggtagcgatgctgattccggtgagcggctggttggccgaccgcttcggcacccgcaaggtctttatcgttgccgttagcctgtttaccttaggttccctcgcctgcgcgctttccacttcgcttcccgaattggttgtcttccgcgtcatccaggggatcggcggcgcaatgatgatgccggttgcgcgcctggcgctgttacgcgcctatccgcgtagcgaactgctgccggtactcaacttcgttaccatgcctgggctggtcggccccatcctcggtcctgtactcggcggcgtgttagtcacctgggccagttggcactggattttcttgattaacatcccgattggcatcatcggcattctctacgcccgcaaatatatgccggacttcaccacgccccgccgtcgtttcgacaccagcggttttgttctttttggtttaagtctggtgctattctccagcggtattgagctatttggcgagaaaattgtcgccagctggatggcgctgtccgtcatcgccctgagcgtcgtgctcatgctggcctatattcggcatgctcgtcgccatcccactccgctgatttcactctccttatttaagacccataccttctctgtcgggatcgccggcaacctggccacacggttaggtaccggctgcgtgccgttcctgatgccgctgatgctacaggtcggtttcggctacccggccattatcgctggctgcatgattgcgccgacggccattggctcgattatcgccaagtcgaccgtcacgcagatcctgcgctggtttggttatcgcaaaacgttggttggagtcaccatctttattggtttgatgatcgcgcagtttgcgttgcagtcgccgggaatgccgctgtggctgctactactgccgctatttgtgctggggatggcgatgtccacgcagttcacctcgatgaacaccattacgctagccgatttaaccgatgacaatgccagtagcggcaatagcctgctcgcggtaacccagcagctgtcgattagccttggcgtagccatcagcgcggcggtactgcgtttttatgaaggatttgataacgccagcaccatcgaacaattccactatacctttatcacgatgggtgcgatcaccgtggtgtcagcgttgatgtttatgctgctcagagccaaagatggccgcaacctgataacggagcggcacaaacactaagctgaaccgcgaatcaccaattctggtgtgagctgcacgcgctgctgtttttgcccgggatccgccatgcggtgaatcagcacatcgatagccagctctcccagttcatcttttggttgatgaatggtggtgagcggcggggtcatatagcgcgccagttcaatatcatcataccccaccagcgccatatcctgcggaatacgcaacccggcctgatacagcgcctgatacgcgccgaccgccatcgcatcattaccgacaaataccgcctgtggccgtggcgttaacgccagcagttgctgcatcgcagtaaaaccgccgccaaattcaaaatcgctggtaatgacataaccttcggcgacatccagcccggcgcgcgccatcgccgcatgatagccttccagccgcagtcgcgacggcgtcttatccagcggcccggcaatgcaggcaatacgggtatgaccgcgatcgatcagatactgggtcgccatatcgccaccgagcaatgaattatcctgaatcagatcgctgtcgccatcgaacggcgcccaatccatcatcaccgtcggcaccgacggataacgctgcatgatctcctgggaaggttgatgcgtttcggtgcacagcagcagcagaccatcgacgcgtttttgcatcagcgtttccagattacggttcatccgctgctcatcgccttcggtattacataacaccaggctgtagccgcgctcgaaacaactgcgctccacgccgcgtaccagttccgagtaaaacggattggtactggcggtgatcagcatgccgatggttcgcgtctggtttaacttgaggctacgcgccagcgccgacggcgcgtagttaagacttttgatcgccgcatcaactttggcggtaatcgcctcgctgacaaagcggtctttattaatgacgtgagaaacggtcgaggtggaaacgcccgcgacgcgggccacatccttcatggtagccaagcattacccctgttgacgcaagaattcgtcgatctctttgcgccacggcacagacggttgcgcccccttgcgggtgacggcaatcgcggcggcggcatgggcaaaacggatggcgtctggcacttcacggccttccagcagcgcggtgacaaatgcgccattaaaagtgtcgccagcggcgatcgtatcgatggcctgaactttaaacccggggacccggcggctttcgccctcgcagcttaaccacacgccgcggctgccgagagttatcatcaccgtaccaatccctttcgcatgaagcgcactggcggctttcgcggcatcgtcgtcgctctcgacgcgaataccggtcagcttttccgcttcggtttcattcggcgtgatgacatccaccagcgccaatagctcatccgaaagttcacgcgccggagcgggattgagtaccaccgtagtctgatgctgatgagcaattttcgcggcagccatcacgctctccagcggtgactccagctgcattaacaatgcctgcgcgctggcgatacgttctttctccgcctcaacctgagaaaccgatagcgccgcatttgcgccggcatgaataccgatgacattctcaccttccgcgttaacgaaaattaacgccacgccagtagattcgccagcaacggtacgcaccggcgccacgtcgatgttatcgctcgccagctggcggcggacgcgttcgccaatgtcatcatcgccggtacaggcaatgaaggcaatatccgcgccgctacgcccggcagcgacagcctgattggcgcctttaccgccgaaagccacctgatagtggtttccggtgacggtctcaccaggagtaggaaaggatttaaggttaagaatgtgatcggcattgatgctgccaaggacgacaagtttgcctgcggttttcatcatctttgttcccgggaaagcgcgccaccggactccggtggcgcatgccctgcttttcttttttatgttgtccctcgggtcgttgccggcccgaatcgcattttactgcttaatgaccagtttcagctcaaccggatagctggcatccactttttcgcccttcagcactttatcagcggtttcgacgcctttaacgccgatctgctccggcaactgggcgatagtcgctgccagtttgccactatttactgctttttcgccatccggagtgccgtcaaatccaaccaccatcacatcagattttcctgcagtctgcagcgcacgcagcgcgcccagcgccatttcgtcgttctgcgcaaacaccgcctgcacgtcaggatgcgccgtcagcaggttctgcatcacgttcagacctttagtacggtcgaagtcagcgggctggctggccagtacgttgaacttatgcgccgccacggcctgtttgaaaccttcgccacgctcgcgcgccgcagaggtaccagcaataccttgcagctcaatcactttcgcgctttcgccaactttcttcgcaatatagtcgccggccattttaccacccagcacgttatcggaagcaatatggctcaccacatcacctttagaagcctggcggtcaagggtaatgaccgggattttagcctggttcgccatcttcaccgcattgccaacagcatcggagtcggttgggttaatcagcagcagcttagcgccacgcaccgttaagtcctgtacgttcgccagctcttttgccgggttattctgagaatccagcaccaccaggttgtaacccagcttatcggcttctttctgcgcgccgtctttcagagaaacgaagaacgggttattcagggtagagataaccagtgcgatggtatctttcgccatcgcgtttgcgctaacggtcgcgcttagagcaacagcagagaccagggtcgccagttttttcatattcatagttaagatgtcctgtagagttctcagttactgctttttgttatctaccagtaccgccagcaaaatcaccaccgctttgacgatcatctggtaataggaagaaacgcctaaaaggttcagaccattgttcaggaagccaaggatcagcgcgccaatcagcgtgccgacgatgcgtcccttaccaccggccaggctggtgccgccaagtacgaccgctgcaatcgcgtctaattcataacctgtccccgccgtcggctgcgccgaggaaagacgcgccacttcgatgatcccggccagtgaagccaacatcccgcacagcgcatatacgatgattttaactctattcacgctgatgccggaaagccgcgtcgccgcttcattaccgcccagcgcgtaaatataacggcccaggcgagtatggtgcagcatgtaccaggccgccaggaagacaatcgccataatccataccggcgtcgggatcccaagagggcgtccgataccgaaccagccaaacagatcggcgttatcgctaaagccggtgttgatcgggctgccgttggtataaaccatcgtcacgccgcgcagcagcagcatcattaccaaagtggcgataaacgcctgcacgcgccctttcgctacaatcaccccggtcaccgcgccaatagctgcaccgagcgccagagcggcggcaacggccaccagcgcattcacttcgataccgacgatagacgccgcgacggcgccggtcaacgccagcagagaaccgacggacagatcgatccccgatgtcagaatgaccagcgtcatcccgaccgccatgatggcattaacggaagtctgctgcagaatattgaacaggttattaacggtaaaaaagttagggctcatggtcgaaacaatcgcgatcagcaccagcagggcgatcagcgatttttgctccatcagccacgctttagtgaaatagcggcgaccagtaacagcctgggtagtcatcttttttactcctgattcacacggttaagcttgcccacagcggcagccatcaatacttcctgggtggcctgctcgcgtgtgaattcaccgccgagatgcccttcatgcatcacaatgatgcgatcgctcatgcccagcacttccggcatctcagaagagacaaggatgatgctcaggccatcggctttaaactggttaatcagctggtagatctctttcttcgccccgacgtcgacgccacgggttggttcgtcgaggatcagcactttcggccgggtcatcagcccgcgagcgatagcgactttttgctggttaccgccggaaagcaggccgattgcctgctccattgaaggcgtcttcacattaaacagccgaatgaaatcgctgaccgcctgctgttcatctttatgcttaaggctgccgcccgcccggctgaagtagcgcagcgcggttaatgacatgttttctttgaccgacattccgagcaccaggccatcacgcttacggtcttcggagatatagacaatgccgttcgccaggccatcctgcggcgaacgggtgacgacttcatggccatccagcgtcacggaaccgctgctacgcggcagcgcgccgtacagcactttcatcagttcagtacgcccggcgcccatcagcccggcgacgccgaggatttcgccctgacgcagggtaaacgtcacattttccacaccggagccgcagagattatcgaccttcagacgtaccgcgcccggcgccttatcgagatgcggatattgatcttccagcttacggccaaccatcatctcgatcagtcgatcctcatccagcgaagccacttcgcgctcggcaataaattgcccgtcgcgaaatacggtgacgtcatcgcagatttcgaagatctctttcatgcggtgggaaatatagacaatgccgcgcccctgcgatttcaattcgcggatgacgcggaacagcgattcggtctcggtatcggtcagggcatcggtgggctcatccataatgatgaccttcgattcgaagctcagcactttggcgatttccaccatttgctgatcgccaatcgacagatcgcccaccagcttctggctgttaaaacgtaaattcagcttcgccagcagcttgtccgcttcggcatacatctttttccagtcgattttgccaaagcggttaacgaactcgcggccaaggaagatgttctcggcaatcgttaattgcgggatcaggttgagttcctggtgaataataccgataccggcctcctgtgaggattttgggccgttaaaggtcgtttctttacctaaccacagcaaagaaccggcatcacgggtatagataccggtgagtaccttcatcattgtagatttaccggcgccattttccccgaccagcgccattacccggccagcatagacattcagcgccgcgccggagagcgctttgacgccagggaacgctttatcgatccctttcagctgtaataaagcttccatggcggcgacctcagaaagtgacgccggcacagagaataatattcgcatacggggaacactccccgctgcgaattaccgcctgactatctgcggtttgttttttgaactgctcatgactggtgtaacgaatttcaatcgtatttccctggtgctgctgcagctgctcaagatgattgagcaacgtcgcgtggagttgcggattatgggttttaatctcttccgcgatgaccgccgcctcaacctgcatttccgccgttacgacttccagtacctgcataaaagaaggtacgccctgagtaagcgccatatcaatgcgcgcgctgttgcggggaaccggcaacccggcatcgcaaacaaccagcgtatcggtatgaccgaggcgggagataacggaagaaatatcagcgttaagtacggtgccttttttcattttttctcttttgctccactagcgaaacgtttcgctgccctaagtattgtcaatcagcgaacagaaaaccaccggcagaagagagaaatgtgatcgccatcgaaacgtttcgcaacgcggggacaagaagttacatcaagatgtgagagacaaaaaagcccttcactattgaagggcttttcgacatcagatttccacctgcgtaccgagctcaataacccggttcggcgggatttcaaactgatccggcgcgcgcagggcgttacgctgcagcagcagatacagcttgccacgcaggcgcagataccatggccgtttgccaataatcagcgactcatgggacataaagaacgacgtttccatcattcggcagctcaacccttccagaccgcagcgatggaacacctcttcgacgttcggcgtttcacgccagccatagcttgccacgacgcgccagaacgacggcgacagttgctcaatctgcacgcggcgaacgttatgcacatacggggcatcttcggtacgcagagtcagcaggatcacgcgttcatgcagcaccttgttgtgtttcaggttatgcagcagagcaaaagggatcacgttcagggcgcgagacatatagactgcggtacccggtacgcgcaccggcggcgatttctccagcgaggagatcatcgcttccagcgagttgccatgctcatgcatccggcgcagcaggcggaaacgctcgctcttccaggtggtcatcaccgtaaacatcaccagacccagtgataacggcaaccaaccgccggagatgattttatcgaggttcgccgagaacaacggaatatcgatacacaggaaggccaccagcatcaggccgacaaacagcttattccagtgccagtttttgcgcgccacggtcgccgaaagaatggaggtcaataccatggtgcccgttaccgcaataccatacgccgccgccagattagaggagtgctcgaagctgacaatgacgatgaccacagaaacgtacagcagccagttaatgaacgggatgtaaatctgcccggactccatttccgaagtatggataatgcgcattggcgatagatagcccagacgcacggcctggcgagtcagcgagaagacaccggaaatcaccgcctgcgaggcaataaccgtcgccagggtcgcgataatcagcatcgggatcagcgcccattccggcgccagcaggaagaacgggtttttaattgcttccgggtgcttcaacagcagcgcgccctggccaaaatagttaagcaccagtgatggcagcaccaccgagaaccacgccacgcgaatcggtagtttgccgaagtggcccatatcggcatacagcgcttccacaccggtaatcgacagcaccaccgcgccgagcgcaataaaggagaccgttttgtactgcaggaagaagttcactgcccagtaagggttcagcgcctgcagaacttccgggttatcgagaatactgcgcgcgccaagcaccgccagcaacaggaaccagataagcataattggcgcgaacagcttgccgaccatcccggtaccgtgtttttgaatagcaaaaagcagggtcaagacaataatggagatggggacaatccaggtatccagctgtggggcgataatttccaacccctctatcgctgacatcaccgatattgccggggttattaccacttcaccataaaagaagctaccgccaatcaggccgagtatcaccaatacggaggtcatctttgccgaggtgttgcgccccgccagcgacatcagcgttaagatcccgccctcgccggcgttatccgcccgcatcacgaaggtgatgtatttaattgatacggtaaagatcaacagccagaaaatcagcgacagaaagccaaacaccgcatcgcgttcaacgccaaagccaaactggcctgacagacattcgcgaagggtatacagtggactggtaccgatatcgccgtaaaccacgccgattgccgccagcgttattgccggcaacgattgtttattatcagtgctcatagactagtcttttcgtttataaaacaaatgtgtgcctagtcccttggcccacaaaaagcgcacagtatgcacgattatttgctgaatcgtacccctaaatgacaccatattaacttagctcaaagaaaataaatcgattcttcaggctattaccacccctaatcaaacatctatactcgacgcaataacgacacacgacaaagcacgcaactctattatggctcaatcacatttactggcagaaagaatttcccgacttagcgccgccctggaaaaaggactctttgaacgcagccacgcaatacgcctgtgcctgctggctgcgctcagcggcgagagcgtattcctgctgggtccacccggcatcgcgaaaagcctgatcgcccgccggcttaagttcgctttcaagcaggcgcgcgctttcgaatatctgatgacccgcttctccaccccggaagaagtcttcggcccgctgtcgattcaggcgctcaaagatgaaggccgctatgagcgtttaacggcaggctatctgccagaagcggaaatcgtcttcctggatgaaatctggaaagctggcccggctatccttaataccctgctgacggccatcaacgaacgccacttccgcaacggtgcccatgaagagaaaatcccgatgcgcctgctggttgctgcatcgaacgaacttcccgaagcggataacagcctcgaagccttatatgaccgcatgctgatccgcctgtggctggataaagtacaggataaaactaacttccgctcgatgctggtgagccaacaggatgaaaacagcaatccggttcccgaaaacctgcaaatcagcaccgaagagttcacccagtggcagcatgatattggtaccgtgaagttgccggacaatgtcttcgagctggttttccagctgcgccaacaattagatgccttgcctaatgcgccttacgtgtccgatcgccgctggaaaaaggccatccgtctactgcaggccagcgccttctttagcggccgcgacgccatcgcgcctatcgacctgatcctgttgaaagattgcctgtggcataacatcgaaagcatgaatctgatgtctcaacagttggaatccctgatgaccagccatgcctggggtcagcaggcgatgctgactaaactgggggctatcatccaacgccgtattcaaatccagcaacagcacagcgataaaaccgcgcttaaagtcacgcgcgttggcggcatgttcagccgtaaaccgcattacgaactgccggacggaattgaaggcgagacgttgacgctgcttctccagcaaccactgaaactgcacgatctcgaagtcattcatatcgcctttgaacgcgcagcgctggtcaactggctggagaaaggcggcgagatccgcggcaagctcaacggtatcggttttgcccagccattgacgatggatgtcgatgccagccagcatctggtggtgcgcgacgtcagcctgcaaggttcgcgcctgtcgctgcccggcagcgaatcccaggaaaatatgccagccgagatccgccagcaactggaagcgctggatgacgagtggcaccagcaacataaccgctttagcgaacagcaaaaatgcctgtttattcccggcgactggctgggcgtatcgaagccagcctgcaggacgtcggcgcgcaaattaaacaggcgcgccagccatgacgctcgacatgctgaatgtcatgctggcggtcagcgaagaagggatgatcgaggagatgctgctggcgctgctggcctctcctcaactggcggtgttctttgaaaaatttccgcggctgaaaaatatcatcgccgccgatattccgcgctggcgagaagcggttcgcgcccggctcaaagagacgcaaatccctcccgaattggacgccgaagtgcagatctatcagcaggctcagctgctttcaacgtcgcaatttattgtgcaactgccgcagatcctcggcaagctgcataagctacagtcgccctttgccgctcaggcgcagcagctggtggacgataacgcgaccttcaccccagcgctacatactctgttcttacaacgctggcgcttaagcctcgtggtacagaccaccaccctcaaccagcacctattagacgatgagcgcgatcagttgctcagcgaggtgcaggaacgaatgacgctcagcgggcagctagagccggtgctggtggaaaacgacaacgccgccggccgcctgtgggatatgagcgccggcgagcttaaacgtggcgattatcagttgatcgtgcgctatggcgattttctcagccaacagccggaactgatgcagcttgctgagcagttgggcagatcgcgggaagccaaactggtgccgaagaaggatgcgccgatggaggccttccgcgctatggttcgtgaaccggcaacggtaccagagcaggtcgatggcctgcagcaaagcgacgatattctacgtctgttgccgccagagttggcaacgctcggcatcaccgaactggagtttgagttctaccgtaagctggtggaaaaacagttgctaacctatcgcctgcacggcgacgcatggcgggagaaaataaccgaacgcccggtaacccggcaggattttgatgagcagccgcgcgggccatttattgtctgcgtagatacctcaggttcgatgggcggttttaacgagcaatgcgccaaagccttttgtctggcgctgatgcgcgtcgcgctggcggataaccgtcgctgctacatcatgctgttctccagcgaagtggtgcactacgagctaaccggcccgcaggggctggagcaggcgatccgttttttaagccagcgttttcgcggcggcaccgatctggccagctgttttcgcgcgatcgttgaacgtttgcaaagcccgcaatgggtcgatgccgatgcggtggtgatttccgattttatcgcccagcggttgccggatgaggtggtcaataaggtgggggaattgcagcacaaacatcagcaccgttttcacgcggtggcgatgtcggtacacggcaaacccggcatcatgcgcatcttcgatcatatctggcgctttgataccggattgcgtagccgcctgctacgtcgctggcggcgttaatctttacagcagagcggcgacgctttcacgcacctgcgcgggccatacgccgcactgtacctggccgatatggtcaagctgtagcaacagcatggttaaacgcgactggccaataccgccgccaatggtctgcggcatttcgccgcgcagcagcgcctggtgccattcaagctgcagacggtcttcatcgccggtcaccgccaactggcgcttcagcgcctcggcgtcaacgcggatccccatagaggaaagctcaaaagcgtcttccagcaccgggttccacaccaggatatcgccgttcaggccggtaaaaccttccgccgacggcgagctccagtcatcataatccggcgcgcggacatcatggcgcttgccgtcagacagtttaccgccgataccgattaagaagacggcgccaagctctttggcgatcgcccgctcgcggcctttggcgtccagatccggataacggcttagcaattcctggctgtgaataaagtggatctgttccggcaggaatggcgtcagaccaaattcctgacttaccgccagctcggtggctttgatcccggcgtaaatcgcctcaaccgtcgctttgagcgtgccggtatgacgttcgccgtcacccatgacgcgttcccagtcccactggtcaacataaacggagtggattggggtgaggcggtcttcatcggggcgaagggccttcatgtgcgtgtatagcccttcgcccgcgctgaagtcgtgttgtcccagggtttgacgcttccacttcgccagtgaatgaaccacttcgaattgggcgtctggcagtgttttcacttttacctgaaccgctttctcgcagccggataagttgtcctgtgtcccatcacctacgcggcttaagatcggcgcctgcacttcaatcaggccaagcttctcttccaactggcgggaaaaatgggatttcacgaaactaatctggcgttgttttgcgatgtatgcggttttcattttttatcactcctgcgtcctgttgatattgattaagcaacagaaccggcatcaaattcaataatcaatcaacaaaaagacaccttgagttttgattcattaaattaacaagctaaaataaaaggattcatcaaacatcataagaaaaaacaatggaaaattatcagatcgacaatctggaccgcggcattcttgatgccttaatggccaatgcgcgcactgcctatgccgaactggctaaacagttcggcgtgagtccaggtacgattcacgtacgcgtagagaaaatgaaacaggcgggcattattaccggcgcgcgaattgacgttagcccaaaacagctcggttatgacgtcggctgtttcatcggcatcattcttaagagcgccaaagactatccttccgccctcgcccggctggagagcctggaagaggtgacagaggcttactacaccaccggtcactacagcatctttattaaggtgatgtgtaaatctatcgatgccctgcagcaggtacttatcaacaagatccaaacaatcgatgaaattcagtccactgaaaccctgatcgtgctgcagaacccgatcatgcgtaccatcaagccctgatcgttttttttaatcccacatttttccacaggtagatcccagctcgctcacagcgtacaatacgccactcagaatagttgagcgagcgatcggcgatcatggcagacattacacttatcagcggcagcaccctgggcagtgcggaatatgtagcagaacatctggcggaaaagctggaagaagcgggctacagcactgatatccagcacggtccgctggttgacgatctgcaggctgaagggatctggttagttatctcttctacccatggcgccggcgatattccggacaacctggtccccttctatgatgcattgctggagaagcaggccgatctttccgccgttcgctttggcgcggtgggcatcggtagccgtgaatatgacactttttgcggcgcaatcgacaaactagaagcagcattgaaggccagcggggcaaaacagatcggcgaaacgctgaaaattaatgtcctcgaacacgagattcctgaagatccggccgaggtttgggtgggatcctggaaagatttactctaagttttgtaaagatccacactttcttctgtggataaacctgctcaaaagcttggatcaaccggtagttatccaaagaataaccgaagtatgctttttgagctgtgcataacccttcattctgatcccagcttatacggaacaggatcaccgatcattcacagatagtgatccttattaagcgtttgatcttaaacagtggatccgacttatccacaaagagagtcgatcctaataagagatcacaatagaacagatctctaaataaaagatcttctttttaatactcaggatcccggagtctttctcgaaagaacaaagttgagtagaatccacggcccgggcttcaatccattttcaaaccgcgttatgcgaggcagatcaccatgttttatcaggatccttttgacgtcatcatcattggcgggggtcatgcaggcactgaggccgcgatggcagcagcgcgaatgggccaacaaaccctgcttttgacacacaatatcgacacgctagggcagatgagctgcaacccggcgattggcggcattgggaagggacacctggtaaaagaagtggatgcgctcggtggtctgatggcgaaagcgatcgatcaggcaggtattcagtttaggatactaaacggtagcaaaggcccggctgtccgtgcgacccgtgcccaggccgaccgggtgctgtatcgtcaggcggtacgtaccgcgttggagaatcagccgaacctgatgatcttccaacaggcggtggaagatcttatcgtcgaaaacgatcgcgttgtcggcgcggtaacccaaatgggcctcaaattccgtgctaagtcggtggtattgacggtcggcaccttcctggacggcaaaattcacatcggtctggacaactacagcggtggtcgtgccggcgatccgccgtcgatcccgctgtctcgccgtctgcgtgaactgccgctgcgcgtaagccgcctgaaaaccggtactccgccgcgtattgacgctcgcaccatcgattttagcgtgctggcacaacagcacggcgataatccgatgccggtcttctcgtttatgggttccgcggatcaacacccgcgccaggtaccgtgctatatcacgcacaccaacgagaaaacccatgatgtcatccgcagcaacctcgatcgtagcccaatgtacgccggggtgattgaaggtatcggcccacgttactgcccgtcgatcgaggacaaagtcatgcgctttgccgatcgcaaccagcatcagatcttccttgaaccggaagggctgacttcaaacgaaatttatccaaacggtatctccaccagcctgccgtttgatgtgcaaatgcaaatcgtccgctcaatgcaggggatggaaaacgcgaagatcgttcgccctggttatgccattgagtacgatttctttgacccgcgtgacctgaagccgacgctggagagtaaatacattcagggtctgttcttcgccggccagatcaacggcactaccggctatgaagaagccgccgcgcagggtctacttgccggtcttaatgccgcccgcttctcagcggaaaaagagggttgggcgccgcgccgcgatcaggcctaccttggcgtgctggtggacgatctgtgcacactcggcaccaaagaaccgtaccgcatgtttacctcccgtgctgaatatcgcctgatgctgcgtgaagacaacgccgatctgcgcttgaccgaacaggggcgtgagctggggctggtggacgatgagcgctgggcgcgtttcaacgagaaactggaaaacattgagcgtgaacgtcaacgcctgaaaaccagttgggttaacccgctggcggaaagcgcggccgaagtgaacgctcacctgaccgcgccgctatcgcgtgaagccagcggcgaagatctgctgcgtcgtccggaaatgacctacgaacagctggttcagctttctccgttcgcgccgggcctgcaggatcaacaggcggcagagcaggttgagattcaggttaagtacgaaggctatatcgctcgtcagcaggacgaaatcgaaaagcagcagcgcaacgagaatactttgctgccggcaacgctcgattaccgtcaggtatccggcttgtccaacgaggttattgccaagctgaacgaccataaaccgtcatcgatcggccaggcatcgcgtatttccgggattaccccggcggcaatttctattttgctggtgtggctgaaaaagcaggggatgctgcgccgcagcgcctgataaccgtcagagcgcgttaatttggcggatgcaaaatcagcgatcgcctttataattcacagcccggtaagcgttagcgcctccgggctcattatttttagaaggtactcaccgtgctcaacaaactttctcgtctgctggacgaagcgggtatttcgctcaccgatcaccagaaaaatcagctggtggcgtatgtcgggatgctggataagtggaacaaagcctataacctgacttctgttcgcgatcctaacgagatgctggttcgtcatatcctcgatagcattatcgtcgcgccgtatttacagggctcccgctttatcgatgtgggaaccggcccgggcctgccgggtattccgctggctatcgtgcgcccggaatctcatttcacattactggatagccttggcaagcgtgtgcgcttcctgcgccaggtccagcatgagctaaaactggataacatcacccctgtacagagccgtgtggaagcgtttcccgccgagccgccgtttgatggcgtcattagccgcgcttttgcctcgctgaacgacatggtgagctggtgccaccacctgccggcggcagatgggcatttctacgcgttgaaagggcaggcgcaggaaagtgaaatggcagacctgccagaaggttatcaggtttgcaacgtgattaaactacatgtaccccagttggaaggggagagacatttggtggtcattaagccaaacgccttataatttttatcaaaaaatgtggaaaaattgtggcctgcgcatgttacaaaaatcaaagttacctgcgggtattatctggccgcttttaaccttgtttttactatggcttttcttgcgtttaactttagcgtggtggtttactggcagaatagtcaactttgaaaatatcagggtgctaaaaatcgatgaactgtcagttcatattgatgttaaatttttattataaatgtcaataaaaggtttttattgtatgtggggttgttttacaaaaagacctcactttttgtcttgaatatcaaaaagatgaaaacttactgattctgtacagatttaattcgattgcgccgaaaatgtttattatgtgatctaatgcacgctttaatggccgcgttttctcattatttgcacttctggttgatccctcactgattgacaaaatgcatgaaaaattgccgctcagaaaataattaaacatttattcactattttgctacttaatgtttgaaatcacgtgttgtcaccgtataatttgtccgctttttgacgcttgactcttggtcttaaagaacgttttatacgacacgcggcatacctcgaagggagcaggagtaaaaacgtgatgtctatgtcgctcgtgagtcgaaacgttgctcgaaagcttctgtttattcagttactggcagtaatagcaagtggactgctgttcagcctcaaagaccccttctggggcatctccgccatatgcggaggtttggcagtcgttttgccaaacgcgttgtttatgatttttgcctggcgccatcaggcgcatacaccagcacaaggccgagtggcctggaccttcgccttcggtgaagcattcaaggtgttgctgaccttcgccttactggcgatggcgctggcggtttttgaagtggtatttttgccgctgatagtgacgtgggttttggtgctggtggtacaaattctggctccagctgtaattaacaacaaagggtaaaaggcatcatggcttcagaaaatatgacgccgcaggattacataggacaccatctgaacaaccttcagttggacctacgtacattctcgctggtggatccgcacaacccccagccaccttctggacgctcaatattgactccatgtttttctcggtggttctcggtctgctgttccttgccatgttccgtagcgttgctaagagagcgaccagcggcgtaccagggaaattccaaaccttcatcgaaatgatcatcggcttcgtccatggcagcgtcaaagacatgtaccatggcaagagcaaggtcatcgcgccgctggcgcttaccgtgttcgtctgggtattcctgatgaacctgatggacctgctgccaatcgacctgattccttatatcggcgaacacattttcggcctgcctgcactgcgcgtggttccgtctgctgacgtgaacatcaccctgtcaatggcgcttggcgtgttcatcctgattattttctacagcatcaaaatgaaaggcgttggtgggttcgttaaagaactgaccatgcagccgttcaatcactgggcgttcattcctgtcaacttaatccttgaagggtaagcctgctgtccaaaccggtttctctcggtctgcgactgttcggcaacatgtatgccggtgagctgattttcattctgattgctggtctgttgccgtggtggtcacagtggattctgaatgtgccttgggccattttccacatcctgattattacgctgcaagccttcatcttcatggttctgacgattgtctatctgtcgatggcatccgaagagcattgatttttaccaacactactacgttttaactgaaacaaactggagactgtcatggaaaacctgaatatggatctgctgtacatggctgccgctgtgatgatgggtctggcggcaatcggtgctgcgatcggtatcggcatcctcgggggtaaattcctggaaggcgcagcgcgtcaaccggatctgattcctctgctgcgtactcagttctttatcgttatgggtctggtggatgctatcccgatgatcgctgtaggtctgggtctgtacgtgatgtttgctgtcgcgtagtaagttgttcgaaagaaacctaagccacagagttaatttaagaggtattgtgctgtgaacatgaacgcaacaatcctcggccaggccatcgcgtttgttatcttcgtatggttctgcatgaagtacgtatggccgccgttaatggctgccatcgaaaagcgccagaaagaaatttctgacggtttagcttctgcagaacgcgctaagaaagatttggaccttgcacaggccaacgcgaccgaccagctgaaaaaagcgaaagcggaagcccaggtaatcatcgagcaagcgaataagcgtcgctctcagattctggacgaagctaaagctgaagcagaacaggaacgcaccaaaatcgtcgcacaggcgcaggctgaaatcgatgccgaacgtaaacgtgctcgcgaagaactgcgtaagcaggttgctatcctggctgttgctggcgccgagaagatcatcgaacgttccgtggatgaagctgctaacagcgacatcgtggataaacttgtcgctgaactgtaaggagggaggggctgatgtctgaatttgtaacggtagctcgcccctacgccaaagcagcttttgactttgccgtcgaacacaaaagtgttgagcgctggcaggatatgctggcgtttgccgctgaagtgactaaaaacgaacaaatggcagagcttctctccggtgccctggcgccggaaacgctctcagatgcgtttatcgctatctgcggcgagcaactcgacgaaaatggtcagaacctgattcgggtgatggctgaaaatggtcgtctgaaggtgctcccggatgttcttgagcagttcattcacctgcgtgcggccagcgaggccatcgcagaggtagatgttatttctgccaaccaactgagtgaagaacagcttgcgaagatctccggcgcgatggaaaagcgtctgtcacgcaaagttaagctgaattgcaaaatcgataagtctgttatggcaggagttatcatccgttcgggtgatatggtcattgatggtagcgtacgcggccgtcttgatcgcctggcagacgtcttgcagtcttaaggggactggagcatgcaactgaattccaccgaaatcagcgaactgatcaagcagcgcattgctcagttcaatgttgtgagtgaagctcacaacgaaggtactattgtttctgtaagtgacggtgttatccgcatccacggcctggccgattgtatgcagggtgaaatgatctccctgccgggtaaccgttacgctatcgcactgaacctggagcgcgactccgttggtgcggttgtgatgggtccgtatgctgacctcgccgaaggcatgaaggttaagtgtactggccgtattctggaagttccggtcggtcgtggtctgttaggccgcgtggtgaacaccctgggtgcgccaattgacggtaaaggtcctgttgagcacgatggtttctcgccaatcgaagttatcgctccgggcgttatcgatcgtcaatccgtagaccagccggtacagaccggttacaaatctgttgatgccatgattccaatcggccgtggccagcgtgagctgatcatcggtgaccgtcagaccggtaaaaccgcgatggcaatcgatgcgatcatcaaccagcgtgattccggcatcaaatgcgtatacgtagctatcggccagaaagcctccaccatctctaacgtggtgcgtaaactggaagagcacggcgcgctgtccaacacaatcgttgttgtggctaccgcttctgaatctgctgcactgcaatacctggcgccgtatgccggttgcgcaatgggcgaatacttccgcgaccgcggtgaagatgcgctgatcgtttacgatgacctgtctaaacaggctgttgcttaccgtcaggtttccctgctgctccgtcgtccgccaggacgtgaagcattcccgggcgacgtgttctacctccactcccgtctgctggagcgcgcatcccgcgttaacgcggaatacgttgagaagttcaccaatggtgaagttaaaggtaaaaccggctccctgactgcgttgccgattatcgagacgcaagcgggtgacgtttccgcattcgttccgaccaacgtaatttccattaccgatggtcagatcttcctggaaaccaacctgttcaactccggtattcgtccggcggttaacccgggtatctccgtatcccgtgttggtggtgctgctcagaccaagatcatcaagaaactgtccggtggtatccgtaccgcgctggcgcagtatcgtgaactggctgcgttctctcagttcgcatccgatctggacgaagcgactcgtaagcagctgagccacggtcagaaagtgaccgaactgctgaaacagaaacagtatgcacctatgtctgtagcacagcagggcctggtactgttcgctgctgaacgcggttacctcgaagatgtggaactggcgaaaatcggtagcttcgaagccgctctgctggcttacgttgaccgtgaccacgctccgctgatgcaagagattaaccagaccggtggctataacgacgagatcgaaggcaagctgaaaggcatcctcgactccttcaaagcaacccagtcctggtaaagtctggcggcttgccttagggcaggccgcaaggcattgaggagaagctcatggccggcgcaaaagagatacgtagtaagatcgcaagcgtccagaacacgcaaaagatcaccaaagcgatggagatggtcgccgcctccaaaatgcgtaaaacgcaggatcgcatggcggccagccgtccatatgcagatactatgcgcaaagtgattggtcaccttgcgaacggtaatctggaatataagcacccatacctggaagaacgcgacgttaaacgcgtgggctacctggtggtgtcgaccgaccgtggtctgtgcggtggcttgaacattaacctgttcaaaaaactgctggcggatatgaaagcatggtccgataaaggcgttcagtgcgacctcgcaatgatcggctctaaaggcgtgtctttctttaactccgtgggcggcaatattgtggcccaggtgaccggtatgggtgataacccgtccctgtccgaactgatcggcccggtaaaagtgatgttgcaggcctacgatgaaggccgtctggacaagctttacgttgtcagcaacaaatttattaacaccatgtctcaggctccgaccatcactcaactgctgccgttaccggcttcagaagatgatgatctgaaacgtaagtcctgggattacctgtatgagcccgatccgaaagcgctgctggataccctcctgcgtcgttatgtggaatctcaggtttatcagggcgtggtagaaaacctggccagcgagcaggccgcccgtatggtggcgatgaaagccgcgaccgataatggcggcagcctgattaaagagctgcagttggtatacaacaaagctcgtcaggccagcattactcaggaactcaccgagatcgtctcggggccgccgcggtttaaccaggttatttcgtagaggatttaagatggctactggaaagattgtccaggtaatcggcgccgtggtcgacgtcgagttccctcaggatgccgtaccacgcgtgtacgatgcccttgaggtacagaatggtaatgagagcctggtgctggaagttcagcagcagctcggcggtggcgtagttcgtgctatcgccatgggttcttccgacggtctgcgtcgtggtctggaagttaaagacctcgagcacccgatcgaagtcccggtaggtaaagcgactctgggccgtatcatgaacgtcctgggtcagccgatcgacatgaaaggcgacatcggcgaagaagaacgttgggctatccaccgcgcggcgccttcctatgaagagctgtccagctctcaggaactgctggaaaccggcatcaaagttatcgacttgatgtgtccgttcgctaagggcggtaaagttggtctgttcggtggtgcgggtgtaggtaaaaccgtaaacatgatggagctgatccgtaacatcgcgatcgagcactccggttactccgtgttcgcgggcgtaggtgagcgtactcgtgagggtaacgacttctaccacgaaatgaccgactccaacgttctggataaagtatccctggtttacggccagatgaacgagccgccgggaaaccgtctgcgcgttgcgttgaccggcctgaccatggctgagaaattccgtgacgaaggtcgtgacgttctgttgttcgtcgataacatctatcgttacaccctggccggtactgaagtatctgcactgctgggccgtatgccttctgcggtaggttatcagccgactctggcggaagagatgggcgttctgcaggaacgtatcacctccaccaaaaccggttctatcacctccgttcaggcggtatacgtacctgcggatgacttgactgacccgtccccagcaaccacctttgcgcaccttgacgcaaccgtggtactgagccgtcagatcgcgtctctgggtatctacccggccgttgacccgctggattccaccagccgtcagctggatccgctggttgttggtcaggaacactacgacaccgcgcgtggcgtacagtccctgctgcagcgttatcaggaactgaaagacatcatcgccatcctgggtatggatgaactgtctgaagaagataaactggtggtagctcgcgctcgtaagatccagcgcttcctgtcccagccgttcttcgtagcagaagtatttaccggctccccgggcaaatacgtttcgctgaaagacaccatccgtggctttaaaggcatcatggaaggcgaatacgatcacctgccggagcaggcgttctacatggtcggttccatcgaagaagccgtggaaaaagccaaaaaactttaacgccttaatcggagggtgatatggcaatgacttaccacctggatgtcgtcagcgcagagaaacagatgttctctggcctggtcgagaaaatccaggtaacgggtagcgaaggtgaactgggtattttcccgggtcacgcgccgctgctcaccgccattaagcctggtatgattcgcatcgttaaacagttcggtcacgaagagtttatctatctgtccggcggcattcttgaagtgcaaccgggcaacgtgatcgttctggccgatacggcaattcgcggtcaggacctcgacgaagcgcgagctctggaagcgaaacgtaaagcggaagagcacatcaagagctctcacggcgacgtggattacgctcaggcgtccgcggaactggccaaagcgatcgctaaactgcgcgttatcgaattgaccaaaaaagcgatgtaacaccggcttgaaagctaaaagccagtctggaaacagactggctttttttatgccttatacgcctgcggtgatgtcggacaaaacacactcccccattttgttattgattagttaaatgatgaagcgtagacttatttttgtgatgttagtcacaaaaaaaactgtcaaaccgcacctgcaatctggaaatcatcatgaaactgttccacaaaatcatcgccaaatttagcgccctgagcttctaatcgctgcgctatcatccagctttcacgtactatcgcgcatcaaaacgacaacatatgcgatgtgaaaacgctgaaaaaggtcacctgaaggtggcctttttgttttttattcatctcattaatcactttccagcccaaactcattgaccttccccgcctggagcaggctaaaattctgtcaggttgccaacttacgatttatcagcgaaagcggtaaatatcactgctttattcaggtggcaaaaaaacagcaaaagcagtgagatagaaggccattcccctcactatcatcgtttttcaacgttaaactgatttgcgatggtgaaaaatagcgccctaaaatggtgtatagcattgagcctggacgttttctccgcgtctcgtttcatgatgaaaaatatgtagcaatttcaacgtgaaaggcttttacttttcgttctaacagctgtcaggatgcgtatgtcaaacagtgcgatgagcgtggttatccttgccgcaggcaaagggacccgcatgtattccgatcttcctaaggtgctgcatactctggccgggaagccaatggtgcaacacgtcattgatgcggctaaagatttaggcgctgccgcggtacacctggtgtacggccacggcggcgatctgctgcgtcaaacgttgcatgaagataacctcaactgggtgctgcaagcagagcagcttggtaccggccatgcgatgcagcaggcggcgccgttcttcaatgatgatgaagatatcttgatgctctatggcgatgtgccgctgatttcggttgaaaccctacagcgcctgcgcgccgcaaaaccgcagggcggtattggcctgttgacggtgaagctggatgatccaaccggttatgggcgtatcacgcgtgaaaatggccaggtcacaggtatcgttgagcataaagacgccagcgaagctcagcgccagattcaggaaatcaataccgggattctggttgctaacggcgcggacctgaaacgctggttggcgaagctcactaacaataacgcccagggcgaatactacatcaccgatattatcgcgatggcccatcaggaaggccatgagatcgttgcggtgcatcctcagcgtctgagcgaagttgaaggggtgaacaatcgcctgcaacttgcgcgtctggaacgagtgtatcagtcagagcaggcggaaaaactgctgttggcgggcgtgatgctgcgcgatccggcgcgtttcgatctgcgcggtgtgctgaaacacgggcgcgatgtcgaaattgatactaacgttattctgcaaggtcatgttgtgctgggcgatcgcgttaagatcggcgccggctgcgtcatcaaagacagcgtcatcggcgatgactgcgaaatcagcccatatagcgtggttgaagatgcgcagctgcaggctgcctgcaccatcggcccgtttgcacgtctgcgtccggggctgaactgctggaaggcgctcacgtcggcaactttgtcgaaatgaagaaagcgcgtctgggcaaaggttcgaaggcgggacacctctcctacctcggcgatgctgaaattggcgacaacgttaatatcggcgcgggtactatcacctgtaactatgatggcgcaaataagcataaaacgatcatcggcgatgacgtgtttgttggttctgatacgcaactggtcgcgccggtcagcgtcggtaacggcgtgacgattgccgcgggcaccaccgtcacacgtaatattgctgacaacgaactggtgttaagccgcgtgccgcaggtccacaaacagggctggcagcgtccggtgaagaaaaagtagtttttagattgtcgccggggatatgtcgcccggcgaaccaggatgagaggatcaatataggtccccgtccgcaggcagtaccataaaaataaccccactctctacaaggctcggggcgcccgtaaagggcaaatacaggtcagcgacaacgcatggcatatcgccattatcaggaaatttaactatgtgtggaattgttggcgcagtcgcgcagcgtgatattgctgaaatccttctcgaaggtttacgtcgtctggaataccgtggctatgactctgctggtctggctgtggtcgataacgaaggtcatatgacccgcgttcgtcgtctcggtaaagttcagatgctggctcaggcggtagaagagcaaccgttacacggcggtaccgggattgcccatacccgctgggcgacgcacggcgagccgtctgagagcaatgcgcatccgcatgtttctgaacatattgcggtggtccataacgggatcatcgagaaccatgagccgctgcgcgccctgctgcagtctcgcggttatgtcttcgtctctgaaaccgataccgaagttatcgcgcatctggtgcactgggagctggaacagggcggcactttgcgtgaagccgtactgcgtgcaatcccgcagctgcgtggcgcctatggtacggtgatcatggatacccgcgatccggggacgctgctggcggcacgctcaggcagcccgctggttattggcctgggcatgggcgaaaactttatcgcttctgaccagctggcgctgctgccggtgacccgccgctttatcttccttgaagagggcgatattgccgaagttacccgtcgtacggtggtgattttcgataaatccggcgcggaagtgaatcgccaggagatcgaatctaatctgcagtatgacgccggtgataaggggatttatcgccactatatgcagaaagagatttacgagcagccgaacgcgattaagaacaccctgaccgggcgcatcagccatggcgaggtcgatctcagcgagctggggccgaatgccaacgcgctgctgtcgcaggttgagcatatccagattgttgcctgcggaacctcgtataactccgggatggtctcccgttactggttcgaagcgttagccggtgtgccgtgtgatgtcgagattgcttcggaattccgctaccgcaaatccgcggtgcgtcgcaatagcctgatgatcaccctctcccagtccggtgagacggcggataccctggcggcgctgcgcctctctaaagagcttggctatctggggtcgttggctatctgcaacgttccgggctcctcgctggtgcgcgagtctgacctggcgttgatgaccaaagccggtaccgaaatcggcgtggcatcgaccaaagcctttaccactcagctgaccgtgctgttgatgctggtggcgaaactggcgcgtctcaagggccaggatgcggctatcgagcaggatatcgtgcatggcctgcaggcgctgccgaaccgtatcgagcagatgctgtcgcaggataagcgcatcgaacagctggcggaacgtttctccgataagcatcacgcgctgttccttggccgcggcgatcagtacccgatcgcgctggaaggggcgctgaagctgaaagagatctcctacattcatgctgaagcttatgcggcgggcgagctgaaacacggcccgctggcgctgattgatgccgaaatgccggtaatcgtagtggcgccgaacaacgaactgttggaaaaactgaaatccaatattgaagaagttcgcgcccgcggcggtgaactgtacgtcttcgccgatggagacgccggtttcagcggcagcgacaacatgcatattatcgagatgccgcatgtcgaagaggtgattgcgccgatcttctacaccgtgccgctgcagctgctggcctatcacgttgccctgatcaaaggcaccgacgttgaccagccgcgtaacctggcgaaatcggtgaccgtagagtaatcaggctgtacggaccgacactcttttgagtgacgctataatccggtatttctgcaaagggatgccggattttttatattgtcacagtctatttttgattttattttaatactattcacaaaataggaattatcctgttttcttgttttttctctgttttcttataggaagtgtttacatacgcgagtgtgtcgtatagtttttatactaaaagccaatgcaaggaatgctatgagttctctcttctctaattcagaaaataagttattaaattatgacttttctcgctggatgggtaatacatctggctctgactttgatttccgcgctctaggttctgcattagattgcacccgtgattttaatcaagtaggtatcatatttaatgatggaagaatgagttatctcgtccgggcttcccgttgttatgctaacccatcgcgaaatcagataacccatgtaatagtcacaaaacttaatcgtagagatacatactcttctgagcaaagtattaagaaatctatatctgagccgtcattaagttcggaaatatcgtcaacagcactatcttgtggcggtgctctgttaactgcgggtgtttttattatcggtactggtgctactgcagttactgctggtgcatcaagcgcatttgcgatattagggtatgcaggtgcggtggcaacaactgcgcaatgtatcaatggtgtgataaggctatgggatattgagttcaataattctgcgttaacaggttggttggattcggaagattggtatacatcaacgtcaacggcgttggatgtcatctctcttgcttctgctgctggtgcattgcttgatgttttaaaaacttataaaagtatgaaagcgatttcttctttagaagccaaaaagtggcttaaagcatggccgaggcaggatcgggctcgtttaaccgagttaattataaaaacacaaaatccgggtatttctaataaagaaataaaagcattgattcgggctggagtttatcctaaacgttaccctattgagccggtccagaaagagcttaaaaaacaactcattagtgcattatcgagtatgactgctttttcgggaagtgcggtgagtggagtcattggttcacctgggagccttaaaaaaactggtgattacgtaatagggacaattcaatcgtttgcgattctaaaatgaaaaacttatgtggtaataatttcttagcgcttctcaagcatggtgtggaaatcgatcaacttatcaagcgaagagatagagatgagatcgcgcagcatacaacaacagatatgatgagtttgtctcatgggcaacgcttatcaccttctccgctagttcctgcttgtatttatttgatattaattgttattttttcagttaatgcggcttttatattgcagagtctccaacttactccgccccgttttctggctttctactttccgctgctattaggggttattgttataaccagcttagctgcagggttagtaggtcgaggtcatgctgttggattacgtatttttatgtacctatatctcgccaatttgtttgttttttgtctagtcctggcgcttgccgtcatcgcagatgaagctattgctgccaataaggtcattctttttatgtgtgagatagccgtactctggttaggccgtagattgatgaatggaacggcttttacactgtttacgctttatcgccgtacgatcaggcttgctatggttgcccaacatctcaacgttgccagatgattttacgctatccataatcatgtaataaaagcaaaaccttcctgtcatatgaccaaaagataaaagtgtaattgattgatattattgtttttattttaggtttttttacttccttctggtgtgtcataaaactgtcataattcgtacattttactgtcacctgtttgtcctattttgctcaccatagcttcgaaacaacggtttacgaatcccagcaggagacattatgaacgttatgcgtaccaccgtcgcaacagttgtcgccgcgaccttatcgatgagcgctttctctgctttcgcagcagcaagcctgactggcgcaggtgcaactttccctgctccggtgtatgccaaatgggctgatacctaccagaaagaaacgggcaataaagttaactaccagggtattggttcctctggcggcgttaaacagattattgccaacaccgtggatttcggtgcttctgatgctcctctggctgatgacaaactggcgcaggaaggcctgttccagttcccgaccgttatcggcggcgtggtgctggcggttaacctgccgggcgttaaatccggcgagctggtgctggatggcaaaaccctcggcgacatctatctgggcaaaatcaaaaaatgggatgacgaagcgatcgctaaactcaaccctggcctgaagctgccggctcagaacatcgccgtggttcgccgcgcggatggttccggtacttccttcgtcttcaccagctatctggcgaaagtgaacgaagagtggaaatctaaaattggcgcaggctctaccgtaaactggccaaccggcctgggcggtaaaggcaacgacggtatcgcggccttcgttcagcgtctgccaggcgctattggctacgtcgagtatgcttacgctaagcagaataacctggcctacaccaaactgctgtccgctgacggcaagccggtcagcccgacggaagataacttcgctaatgcggcgaaaggtatcgactggagcaagtccttcgctcaggacctgactaaccagaaaggtgaaaatgcatggccgatcacctcaaccactttcattctcgtccacaaggcttccaataagccggagaataccgcggaagtgctgaagttcttcgattgggcatacaaaaacggcggcaaagaagcgaatgcgctggattacgccagcctgccggacagcgtggttgagcaggtacgcgccgcatggaaaaccaacgtgaaagacagcagcggtaaagcgctgtactaatacccgcggaatgtcgagctgccggctagcttccagcagctcgaattatttcgggtatagcattacctttgcccgtaagctcagtaaaatgctggctttttgggcccgaacttaaagagtaacctatggctgcaaccaagccggcattcaaccctccggggaaaaagggtgacatgatcttcagcgcgctggtgaaactggctgcgctgattgtgctattgatgctgggtggcatcatcgtttccctcatcatctcttcatggccaagtattcagaaatttggcttttcctttttgtggaccaaagagtgggatgcgccgaatgaaatcttcggtgcgctggtaccgatttacgggactctggttacctcaattatcgcgttgttgatcgccgttccggtgagcttcggcatcgcgctgttcctgactgaactctccccagcctggctaaaacgcccgctgggtattgctattgagctgctggcggcgatcccgagtatcgtatacggcatgtggggcctgtttattttcgccccgctgtttgcgacttacttccaggaaccagtcggcaacgtcctttcgacgatcccgtttgtcggcgcgctgttttccggcccggcgttcggtatcggcatcctggcggccggcgtcattctggccatcatgatcattccttatatcgccgcggtaatgcgtgacgtcttcgagcagacgccggtgatgatgaaagagtccgcatatgggatcggctgcaccacgtgggaggtgatctggcgcatcgtgctgccgttcaccaaaaacggggtgattggcggcgtcatgctcggcctggggcgcgcgctgggtgaaaccatggccgtcacctttattatcggtaacacctatcagctcgacagcgcttcgttgtatatgccgggcaacagtattacctcggcgctggccaatgaattcgcggaagcggaaagcggcctgcacgtagcggcgctgatggaactgggcctgatcctgttcgttatcacctttatcgttctggccgcgtcgaagttcatgattatgcgtctcgctaagaacgaggggcacgctaatggcaacgatcgaattgcaaaccaccgccgcgctggcggaatcccgtcgcaagatgcaggctaagcgccgcctgaagaaccgcattgccctgaccctgtcgatggcgaccatggcgtttggcctcttctggcttatctggatcctgatgtcgaccattacgcgtggcatcgacggcatgagtctggcgctgtttaccgaaatgacgccgccgccgaataccgcgggcggcggtctggcgaacgccctggcgggcagcggcctgctgatcctgtgggcgaccgtttttggtacgccgcttggcatcatggccggtatctatctggcggagtatggccgtaagtcggtactggcggaaatcatccgctttattaacgatattctgctttccgcgccatctatcgtcgtggggctgttcgtctacaccatcgtggtggcgcagatgcagcacttctccggctgggcgggcgttatcgcgctggcgctgctgcaggtgccaatcgtgattcgtaccactgaaaacatgctgaagctggtgccggatagcctgcgtgaagcagcctatgcgctggggacgccgaagtggaagatgatttccgcgatcacccttaaggcgtcggtatccggcattatgaccggtatcctgctggctattgcccgtatcgccggggagacggcgccgctgctgttcaccgcgctctccaaccagttctggagcaccgatatgatgcagccgatcgccaacctgccggtgaccatttttaaatttgccatgagtccgttcgcggaatggcagcaactggcatgggccggggtattgattatcaccctgtgcgtcttgctgctgaatattctggcgcgcgttgtcttcgcgaagaagaaacacggttaatttttgcggcgcggcctaagcggcgccgaatgaggaagagattgagatgagtatggtgaacgcgaatccgggtaaaatttcagttcgtgacctgaacttctactacggcaaattccatgccctgaagaacatcaacctggatatcgctaagaaccaggtgacggcgtttatcggcccgtcaggctgcggtaaatccactctgctgcgtacgttcaacaagatgtttgagctgtacccggagcagcgtgcggaaggcgaaattctgctcgatggcgacaatattctcaccaatacccaggatatcgcgctgctgcgtgcgaaagtagggatggtattccagaagccgacgccgtttccgatgtctatctacgacaacatcgccttcggcgtgcgcctgttcgagaagctgtcgcgcgccgatatggacgagcgcgtacagtgggcgttgaccaaagccgcattatggaatgaaaccaaagataaactgcatcagagcgggtattctctctccggtggtcagcagcagcgtctgtgtatcgcccgcggtatcgcgattcgcccggaagtgctgctgctcgatgaaccttgctcagcgctggacccgatctccaccgggcgcatcgaggagcttatcaccgagctgaagcaggattacaccgtcgttatcgttacccacaacatgcagcaggctgcacgttgttccgaccatacggcatttatgtatcttggcgagctgattgaattcagcaacacggacgatctgtttaccaagcccgcgaagaaacaaactgaagattatattactggccgctacggttgattgcccttctgctttcaggtgctaacccgatgggcaatcaggagacattatggataacttaaatcttaataaacatatttccggccagttcaacgcagaactggagtacattcgcacccaggtaatgaccatgggtgggttggtggagcaacagctttctgatgcgatcaccgcgatgcacaatcaggacagcgatctggcgaagcgcgtaatcgatggcgacaagcaggtcaatatgatggaagtggcgatcgacgaggcctgcgtgcgcatcatcgctaaacgtcagccgaccgccagcgacctgcgtctggtgatggcgatcatcaagactatcgccgagctggaacgtattggcgacgtggcggataaaatctgccgcaccgcgctggagaagttttcccagcagcaccagccgctgctggtgagcctggagtcgctgggccgccataccgtccagatgctgcatgacgtgctggatgcctttgcgcgtatggatcttgatgaagcggtacgtatctatcgcgaagacaagaaagtcgatcaggaatatgaaggcatcgtgcgtcagttgatgacctatatgatggaagattcacgtaccattccgagcgtcctgaccgcattattctgcgcgcgctctatcgaacgtatcggcgatcgctgccagaatatctgcgaatatattttctacttcgttaaaggccaggatttccgtcacgtaggcggcgacgaactggataaactgctcgcgggtaaagatccgaaagagtaaagatcatgatggttgattctggtaaaggaaataatcagaatcaaccatgcttttgtgcatctctgacatattgctgcgattatcgtcacaattaatactctagatatttgagttttaaattttatcgcgtaacaatccttctcacgaactgagcgttgaagttcagatggtgaaaatggattgttactgcgacagcaggcaaaacctgatattgcccccacggcggcgatgtcaggtttttttgttttagacgttaaatggcttgatgataagggttgttaccgcgatgagcgggcaaaacctgaagaggattatctgtttacgcagatagtcaccttcaggttttttttgccacttattcggcatgaaaataaaagctgcagttacgtaaacttgtattaatgcagtttattaaaagcataacgctattttattaattacgtgtttcatttacgccaatacttatataagggattattatgattagaagaaatatgatcgcttcggcgatggtttttctggcgccgctttcttattcaacaaatcttattgccgggcaacttacggttgaacaacggctggagcttctggaaaaagcacttcaggacacgcaaaaagaactcaagaaatatcaggatcgggagaaaaaaagaaacgaggtctgggccgcctggtcgcaaccggtaaatagccagaagacccggagtgcgaaagcgcccacggcgacccaagcggccgctaagccggacgcggtactggtcaaaaatgaacagctggcgcagggcggtgagccagcctatagcgccatgacgctgaaagattttagcaagtttgtaaaagatgaaatcggctttagctataacggttattatcgttctggctggggaaccgcctcgcacggctcgccaaaatcgtgggccatcggctcgcttggccgtttgggtaacgagtattccggctggtttgatttacagctcaaacagcgcgtttttcaggaaggcgacaaacgtgtggacgccatcgtgatgctcgatggcaacgtgggtcagcaatattctgccggttggtttggcgacaacgccggcggcgaaaactaccttcagttctcggatatgtacgtcaacaccaaaggctttttgccgtttgccccggaagcggacttttgggtcggtaagcacggtgcaccgaaaatcgagatccagatgctggactggaaaacgcaaagaaccgatgcggcagctggcgtagggcttgaaaactggaaggtgggcgccggtaaatttgatatcgcgctggtgcgcgaagatatcgatgactatgaccgctctttgactaataagcagcaaattaataccaataccctggatgtgcgttacaaagatattccgctgtgggacaaagcctcgctgatggtcagtgggcgctatgtcgcggcgaatcagagttcatcagagaaatataaagagggtaatgaaggttactaccaatggaaagatacctggatggtgggaacctcgttaacgcagaaatttgataacggcggctttaacgaattttcattattactggcaaacaactccattgccagcagcttctcgcgctatgccggttcgagcccgtataccaccaacaatgggcgctattatggcgatcacaccaacggcaccgccgtgcgcttaacctcgcagggggaaagctatttgcgtgatgatgtcattatggcgaatgcaatcgtctattcatttggtaatgacgtctatagctatgaaaccggcgcccattcagactttgaatctattcgcgctgtgattcgtccggcatatatctggaataaatataatcagaccggcgttgagctggggtacttcaaacagcagaacaaagatgtgactgggaagaaatataacgaatccggttataagaccaccttattccataccttcaaagtaaataccagtatgctgacctcgcgcccggaaatccgtttttatgcgacttatattaaagccgaagatatcgacctggataaggctgcaaacaataccaccgcggtttttgaagatggcaagaacgaccaattcgcacttggcgcgcaggccgaaatttggtggtaaggccgcaagcgcctgatcataaaaacgtaaaaaggaatcaagatgaaacgacatgcaatctacttcaccctggcgctggctggcgccacatttacggcacacgccgcaccactgccgacggtgcctgatgccgccattccagttagccaatatattactcaggtgaatacggataacagcgtgactttccggttattttcccccgatgccaggcgcgtttccgtcgtcacggggtcgacgccagatacctttgtctctcatgacatgaccaaagacagccagggcgtatggacgtggaaaagcgatcgcctggccgccaatctttatgagtactactttgatgttgacggttttcgttccgtcgataccggcagccgttatcagaagccacagcgccaggtgaataccagcttgatcctggtacccggtagcattcttgacgatcgggcggtcccgcacggcgatctgcgtaccgtcacctaccattcgacggcgcttaagtcagaacgccgcgtctatgtctggacgccaccgggctataacggcagcggcgagcctttgccggtgctctatttctaccacggttttggtgatagcggtctgtcggccatcgaccagggacgcatcccgcaaatgatggataacctgctggcggagggcaaaatcaagccgatgctggtggtggtgccggataccgaaaccgatattcctcaagcgatcgcggaaaacttcccgccgcaggagcggcgtaaaaacttctatccactcaatgcgaaagccgcagacaacgaattgatgcatgacatcattccgctgatcgattcccgatttaacgtgcgtaaagatgccgacggccgggcgctggcgggtctgtcacagggcggctatcaggcgctggtgtccgggatgaatcatcttgagaatttcggttggcttgccacctttagcggggttacgacaaccacggttcccgatgctggcgtggaggcgcagttgaataaccctgacgccatcaataagcaactgcgtaactttacgctggtggttggcgaaaaagactccgtcactggcaaagatattgccggcctgaaaagtgaactggaaaagcagaagatcaaatttgattaccactcttatcccggcctgaaccatgaaatggacgtctggcgtccggcctatgccgagtttgtgcaaaagctctttaaataaccgtcaggggcatggtgcccctgtctcaaccagtaaaggaagatgagatgaaattgattgtgacggaagattatgaagagatgagcctggtcgcctgccatcatcttttaggctatatcacgatgccgcgacggatgaatctggcggtgacggcggggagtacgccgaagcgtatgtatgagcatttggtggccgccatcaaagggaaatcattctatgatcgggttcactattacaactttgatgagataccttttcgcggacagcagcgtgaaggggtgacgatttccaacctgcgccagctgttttttactccagcgcagatcaaagaagagaacattcacaaattgacgctggagaatgcggctcaacacgatcgccgcctcgaagaggccggcggtcttgacctgatcgtgctggggctgggcgccgacggccatttttgcggcaacctgccgaacaccacgcgctttcatgatgagacggtcgaagtaccgattcaggggagctgattggcattgtcgcgaacggcgaaatggggggcgatttcaatgtggtgccggatagctatgtcaccatggggccgaaaagcgtgatggcggcaaaaaacctgctgctgattgtcagcggcgcggcaaaggcgcaagcgctaaagcaggtggtggaaggcccggtcagcgaactggtgccggcctctgtactcaagttgcacccttcgttggtgattattgcggataaagcggctgcggcggaattgcagcagtaaaaagccgctggccagcggggctaccattgtgaccaaccgtagcccgggcgagcgtagcgacgccgggtcttaacgagtaatatcccagccacgcgctctccacaatgccggcagctcagctaaatcggtaaaggtcgttactttcggatgaacgatcggttggttgtgcgggtcggcgcagaagtaatagacttccatacccgcggcgatccctgattgggctcccgcgctggaatcatcgaccagaatacagttttcgacttgaacctgcatggcctctgccgcatggaacatcagagccgggtcgggtttccagcgctgaatgtcgtaaccgctgtacagccggtctgggaagtggtgcagcatctgcgttctaccgagcgaatgctgcattttactgaccgggccattcgacaccacgcacatggggatcttcaccgcgtccagcagcgcagcggcgccggggataatctccagctcgctatcgaacagacgggcgacttcggcgcgatacaccggctccagagtctctttctgcaggttaacgccatattcagcgttgatggtgtcgataatctcgtacagcttaacgcctttgaagcgcttaaaaatttccgctaaatccagcgtaataccgaattcctgaaacatgtgtacataggcgcgtgagcaaatcacctcgctgtcgaccagcgtgccgtcacaatcgaaaaatactgcttgtggttgggtcatactttttccaatttaacaagtttaacgttttcgtaatgctcaatgccgcgacgcaatcgttgccgtataagcaaaataaatgaaaaaaattaccatacaaccgcgcctggtgccgtaatttggtataggatagcctcgaattttccctcctttacgttcggaaaccgataatgagtcaacaacaaaccagccagtcttctggccagggtctgctggagcgcgtatttaaactgcgcgagcacggcaccacggtgcgcactgaagcgatcgccggtttcaccacgttcctgacgatggtctacatcgtcttcgtgaacccacaaattcttggcgtggcgggtatggataccagcgctgtctttgtgaccacctgtctgatcgcggccttcggcagcatcctgatgggtctgttcgcgaatctgccggtggcgctggcgccagcgatgggtctgaatgccttctttgccttcgtggtggttcaggcgatgggtctgccatggcaggtgggtatgggcgcgattttctggggcgccgtcggcctgctgctgctgaccctcttccgcgtacgctactggatgattgccaatatcccggtgagcctgcgcgtgggtatcaccagcggtatcgggctgtttatcggcatgatgggcctgaagaacgctggcgttatcgtggcgaaccaggacacgctggtcagcatcggcaacctgacatcccacagcgtgctgttgggcgtgctcgggttctttattatcgctatcctggcgtcgcgtaatattcatgccgccgtgctggtctccatcgtggtcaccaccctgttgggctggatgctcggcgatgtgcactataccggcatcgtctccgcgccgccgagcgtaacctcggttgtgggtcaggtcgatctggccggttcgctgaaccttggcctggcgggcgtgatcttctcgttcatgctggttaacctgttcgactcctccggcaccctgattggcgtcaccgataaagccgggctggcggatgcgcagggtaaattcccgcgcatgaagcaggcgctgttcgtcgatagcgtgtcgtccgttgccggctcctttattggcacctcttcggttacggcctatatcgaatcctcctccggcgtttccgttggtgggcgtaccggcctgaccgccgttgtcgtgggtatcctgttcctgctggtcatcttcctgtcgccgctggcggggatggttccggcctacgccgccgctggggcactgatttacgttggcgtgctgatgacctcaagcctggcgcgcgtgaagtgggatgacctgacggaagcggtaccggcgtttatcaccgcggtgatgatgccgttcagcttctcgatcaccgaaggtatcgccctgggctttatctcctactgcgtgatgaagatcggtaccggccgtctgcgtgaactcagcccgtgcgtgatcatcgtttcgctgctattcgtgctgaaaattgtctttatcgatgcgcattgatccgtacgcatgatgaaatagcccggcatcgctgccgggctttttttatgctttaacccgctgaatataatcgccaaaggcggtcaactggccgcgcagatggtccagcgtgctctgatcgaccacttcgcccgcctgcggatcgactttgttctgaatcacgccgcccataaattccggcttgttcatgaccatcgcatcgaggaagaccagaatctggcgcagatgatactggcagcgagccccgccgatagcgcccattgagctggtctggatcagcaccggcttaccagccagcggctgttccggcaggcgtgagagccagtcgatggcgttcttcaggccgccgggtaccgagtagttatattccggggtaacgatcaccacgccgtccgcttcgcggatttgtttcgcgatctcctgcacgctctgcgggaatccctcttcctgttggatatcggcatcgtacagcgggatatcgccgattgacggcagtgcggagatttccatgcccgcgggcgcaatgcccggcagcgtgcgcgcaaccatggcattaaaagaacctttgcgcagacttccgagtaacgtaacaactttcaacgtatcagacatgagtgctcctttgcatcatgatggccggctaaaccggtcagttgagggagaatactttttctaccggtaagctggtaaagcgcatcaggcgcgcgtcagtctcgttggcgcgcgtttgcgcatcaggcaggcagcgccagccctctttactatcaaattcccagaccttcagcggcccgatattcggggtgacggcgattgaccacaccagcaacgtttcagcatcacagatggcttcaatcgattgggtgccagcggtacgcaggcgaccagaccccggcagcagttgtactcgcacggggcttcaccggtgagcttcagcacgctgcggcgcagcgccaccagttgggcgcgggcttcatccggatcgtgctggatgttaatccataaattttcattgctattgaagacatagcgatcggcggcatgtagcggatggacgccacgcgaggcgtgctgcagttccatatcgagaccgcagtcaccttcggtcgtcagcgctacgccgacaatattcccggcataagagatggaaaagcggggaaggtggggatcgcgaaatacgggccgtccattgggttcgctgatgatttccggcagctcgccgataccataaagcatgaaaagcagttcagcgagcagcgaacgcgaggcgcgatagcggctctgtcggtattcgggtaggttacgtgcggattgatgacatgccgccgacaaacgcgtcgatagcggctccctggtgttgagtatccctcttgcaaaatgcgttgccattcgtcgctccgtgattaatggtcagagataaaaattgttaatgatattatcgctcacaatgagcaggttttaatgcggaaattcttccttgagaagggataatgtctgacttttacaatttcttgcgcaacaacgtgaggatgatgggcaatttccctatagcgtattggaatagagctgtttaagggtctctctgagccatacgatctttggattatagctattacgcttgtgccacagcagggtaaacggcacgcgcattttttccagcagctgcggctcaagcggcagcgggcgcgaaaccagcggcagatgatgctgctgattatagtgctgacaatagcgcggcgcggtggctatcatggtgtgatttggctgcgccgccataaacagcgactgctcaaagccgggcagggtcagggcaacggttcgtttgtggcccagatcatgtagcacatcatccagcgcccaggtgtcgctttgttcccagcagatattgatgtgcggatagcgcaggaaagccgccaggctccactcttcattgagcgccggatgatcggcgcgcagccacacctgcggcaggtcgctaaacaggacatcaaaatcgatataccatggcagcaggctcagctgttcgcgcgaacggggatgggtttcccggccgcaaaaaccgatatcaacctcgccgcgaatgatggcatccagcgagtcgtaatcccagttgcgtaaacggatcagcgcttgtggataacgttgataaatttgctgggagagggtgttgaacaagatcatcagcagcggcgattctgccgccagctcgaacttcaggccgcttggcatggtgtggtgcggtttatcgaggatctgattgcccatctgcatccagtcggcaagatcctgctccatgctgctcattaatggcgttggcgccagccctagcggtgttttaacaaacagcggatcgtcaaaccaggcgcgtagcttggccaatgatttactcaccgccgacggcgaaacgttcatccgtttcgccgtgcgggtgacgctgcgctcctgggtcagaagctgcagacataacagtaagttaagatcgaggctcgacagggatttcttcatcatattgcgtcgcgcgcatcggcgagacgaccagtatcagaacaatactgactatgctacaggcaatgagtatcccgatcagcatattcatggcgctcagcccgatgatagccgccagccaaatccacagcgaagaaccacagacctgagcgatgccgagggcggagctggcgacgcccgcccgcagcgtgaaaggccccaacgcctggctcatcgcgacgccaaagccgaccgagaaacccgcgcagatcatgcctaatcccagcatggtgatgggctggctggcggcgaggctcaataccacgccagcgataaggaacaacgtctgcgaggtcagcatcagagtgcgcggtttaaatagcgtcagagcgaacggcgtggagaacgacacggccatgctgaccattgccatcagcgccatcgccattgaataagttccgcggtcgaaacccatctcttccatcatcagtaccggtgagacgtttacgtaggtcagaattgcggtgacgctgagagtcgtaatgactatgcggctgaggaaaaaacggtttagcagcgactcagcggcgccattgtgctgtgcacctgcctgcggatgcgttgccgggcgcgtctcacgcaggataaacaccgacaataaccctaccatcaccccatgcctgtcatggtgtagaacaggctctgccacggatatttcaacatgatcagatggccaagtaccggcgcgagaacgggaatgatgcaggtaatgccattaagcagcgacagtaccttggcgcggcggcgctcgtccagcgtatcgcgcagaacggcaaaagcgacgacgtagcagcttcccgcgccgatcccctggataaagcggccgatcaggaaatgcgtgctgttatgcgcctgcgagcacagtagcgaggccagtatgaaagtgatggcgccgaaaatcgcgaccggtttacgcccggatttatccgccgctcgcccggcaaaaagcatcgcggtagccatgccggctaaataaacagagaaggcgatatgcagctgcgcctcgctggcgccaagatcctgggcgatgcgcggtaggccgaccagatacatatcaatgccggatggatagagcagtaccaatgcgaaactgcagataagaaagcgtgccataggaccctcgcaataagaatggcgtacagcatagtggctaacgccagggagtacgagttgccatttggacaacactcttttcctgaaaggaaaaacagatgattgcttcacagagatgatgtgattaaggcaatcaaataaaaaacccgccataacagaacgttatggcgggttagtagatacttaccagtaacgcttacttaccgatacagaaactggagaagatgcggcccagcagatcgtcagaggtaaattcgccggtgatttcacttaatgcctgttgcgacagacgcagctcctccgccagcagctccccggcccaggcgcccagcaactgcgctttgccctgctgcaaatggtttgccgccgtttccagcgcctgcaggtggcgacgacgggcgaggaagccgccttccatgttggtatcgaagcccatgctctgcttaaggtggttgcgcagcacctcgaccccttcaccggtacgcgccgacaggcggattagtgagtggccatttacttcgctgagccccagcgcttcgccggtgacatcggctttattacgcaccacggtaatcggcagtttagcgggcaggcgctcgataaagtccggccagatctccgccgggtcaacggcgctggtggtggtgccgtcgaccataaacagcacccgatccgcctgttcaatttcctgccaggcgcgttcaatgccgatacgctccacttcatcactggcgtcacgcaggcctgcggtatcgatgatatgcagcggcataccgtcgatgtgaatatgttcgcgcagtacgtcgcgggtggtgccggcgatatcggtgacgatcgccgcttcacggccggccagcgcgttgagcaggctggatttaccggcattcggccgtccggcgatcaccactttcatcccttcacgcaacaggctgccctgacgagcttcggcgcggacggcgtcgagatcggcgatcacgtcgttcagttgggcttcaattttaccgtcggagaggaaatcaatttcttcatccgggaaatcaatcgccgcttccacgtagatgcgcaggtgagtgagcgcttccacaagatggttcacacgcgccgagaaggccccttgcaaggagttcaacgccgaacgggccgcctgctctgagctggcgtcgataaggtcggcgatggcctctgcctgcgccaggtcgagcttgtcgttgaggaacgcgcgctcggaaaactcgcccggattggcgatgcgaacgccgggcaacgtcagaatacgtttgagcagcagatctagaatgaccgggccgccatggccctgcagttcgaggacatcttcgccggtaaaggagttcggccccggaaaccacagcgcaatcccctgatccagcggcgtaccgtcggcgtctttgaacggcagatagtcggcatagcgcggcttcggcagcttgccgagtaccgcctgcgcgacgtcgcgcgctttaaggccggagatacgcaggatgcccacacccccgcgtcccggtggggttgcctgggcgacgatagtgtcgttatggctcatggtgactctctatgtagatgtaaaaaaggcggtccattgaccgccttctctggcattaacgttaccgtagatactcgaaataattcaagttgcagaaaggcggcaagttagtgaggccccaggagcttactgtagtaagtaactggggcgaactaatgaagccaacgcatctgcggcttgaagaatgaagagtatcaggattttttcttctcgcggctatgcaggccacgcttctccagaccacggtaaatcagctgctgctgaataatggttaccaggttgctgacgatgtagtacaccaccagaccagacgggaaccacaggaagaacaccgtgaagatgaccggcataaaggtcatgatcttctgctgcatcgggtcggtcacggtggtcggcgacatcttctggatgaagaacatggtcgcgcccatgatgatcggcaggatgtagtacgggtcttgcgcggacaggtcatggatccacaggataaacggcgcatgacgcagttcaaccgaggcgctcagcatgtagtacagcgcaaggaagataggcatctgaataatcagcgggaagcagccacccagcgggttaactttttctgctttatacagcgccatcatttcctggctttgacgttgtttatcgtcgcccagacgctcgcgcattgcctgaatcttcggctgcaacatacgcatcttcgccatggaggtgtactgcgctttagtcagcgggtacatgatgccacgaacgataaaggtgatgacgataatcgagaagccccagttgccgaggaagccgtggatgaatttcagcagcttaaacagcggttgggagatgaaccacagccagccgtagtcgacggtcagatccaggtgcggcgcgacggcagccattttatcctgcagagccgggccgacccacaacacgctttccagcttgtcggtttgacctggctgcaccagtaccggctgtgatttatagccgatagcgacaacgccattaccgaggttagcggtatagaagttgttggtgccgttgttatgcggaacccacgcggtggtgaagtactgctgcaacatcgctacccaaccgtctttggtgctgacgttcaggttttcgttgtcgacgatagtatcgaatttatatttttcgtatttcgaatcagcagtggagtacgccgcgccacggaaggtgtgcatggtagacagaccgccggtttgcgtatcgcggcttgatggcagcgctgccgtttgcttcagctgaccgaaggaggaaatctccagcggtttttcgccgacgtttttcacgttgtagccaacgttcaccgcataatcaccgcgtttcagggtgaaggttttggtgaagacgttgcccgctttgtcggtgtaggtcagcggaataacgatttcgttctggccgtcagccaggacatacgcatctttatcagcgttatacagcggacgcgggccgttagccgggttatccgggccgtcacgaccggttaagccgctctgtgcctgatagataaactgtggcgtggtttccagtaactggaacggttcagtagatttcagcgctttcgggtaagccggaagcagcgcttgctcaacatcaccaccgctggtgttgatggtcagatcaagcacatcagttttaaccgtaatcagtttcccctggccactggccggtacgccctggtctgcggcgctacccgctgctgtggtcgtagtctgcgtggtctgctgctgggtttgcggatttttgtcctgctcccaggcttgccagatcatgaaagacacgaacaacaaagcgatgataagaagattgcgttgcgaatccatcgttagtgttctctggtatcaaatggtccaggcgggacggggtcgtcaccaccagggtgtaaagggtggcattttaatacgcgtttcaccgtcaaccaactgccttttatcactccaaacctgcgcaatgcctcaattccgtattgagaacaggttggcgtgaaacgacagtgcggcccgagtagcggactaatcaggcgctgatagaccctgataaggcctatcaggacccgcgagccaggcgacaatggcggcgccataatttttccaacgcttccgagagagcacggttatcgaggtcggcaacccctttctttgccaccaccacgaaatccattggcgggagttcatgttgacgtaaacggaagctttcacgcgtcagacgtttaatccgattgcgttcatgcgcgcgcttaacgtttttcttggcgacggtaagaccgatgcggggatgccccagcgaattcaggcggccgaggatggtgatttgcggcgtgccagcccgttgtggctgctggaagacgaaagtgaaatgactgggagttaacaaacgtaactccctgggaaatgctagcttaaccacgcagggttagctttattacttggaaacggtcagacgagcgcggcctttagcacgacgacgtgccagaacctgacgaccatttttattagccatacgagcacggaagccgtgagaacggttgcgcttcagtacagacggttgaaaagtgcgtttcatggcgatttctacctaaacttgaataaattcactgacttttgcgtagacccgaacgaacttcgaacgacttacgcctcagcgtgggtgattaaagaggccggattgtaataattgtacactccggagtcaattctctttccttatttctcgcaccttgccgcacaaaaaataagctgaggcgagttgcgaaaacgggcattacgcgccgggtggggattatacggcctggcgggtaaagcgcaaggatcgtaaaggatctttgttagatcaattccatccaaaaccggcatagctcattaatttttccaatatgcgggcgaaatcgtgccgcactctcgccaggatcgattacacttaaccggtttcgatcctcctgtggataaatcgggaagaatctgttgagaaacacaagatctctttctcagtttaggctatgatccccggtcccgatcgcgatccacggatccgtcccgggtaaaaccgcaaatagcggttcgcacgtcacccttttgcgcaggggctttttcggctaatgcagggtcttgcgacgtgtgccaacaatcacgattgtttcagtttttcttttatatcgattttatgttcgagtggagtccgccgtgtcactttcgctttggcagcagtgtcttgcccgattgcaggatgagttaccagccacagaattcagcatgtggatccgcccattgcaggcggaactgagcgataacacgctggcactgtatgcgccaaaccgttttgtgctcgattgggtaagggacaaatacctcaataatatcaatgggctcctcaatgacttttgtggtgcggacgccccacagctgcgctttgaagtgggcgcgaagcctgcggcgccgtcccaccaggggacggccaacgtcgccacggcgatcccggccgctcaggtgcaaaccgcgcgcgtcgcgccggctgtcgcccgtcagggctgggataacgttccggcgccggcagagcccacctaccgttccaacgtcaacgtcaagcatacgtttgataacttcgtcgaaggtaaatctaaccagctggcacgcgcggcggcgcgtcaggtggccgataacccgggcggcgcgtataacccgctgttcctttatggcggcaccggtctgggtaaaacccacctgttgcacgccgtcggcaacggcattgtggcgcgtaagccaaatgctaaagtggtttatatgcactctgagcgtttcgtgcaggacatggttaaagccctgcaaaacaacgccatcgaagaatttaaacgctattaccgctccgttgacgccctgctgatcgatgatattcagttcttcgccaataaagagcgttcgcaggaagagttcttccacaccttcaatgccttgctggaaggtaatcagcagatcatcctgacgtcggatcgttatccaaaagagatcaacggcgttgaagatcgtctgaaatcgcgctttggctggggcctgacggtggcgatcgagccgcctgaactggaaacccgcgtcgcgatcctgatgaagaaagccgatgagaacgatatccgcctgccgggcgaagtcgcgttctttatcgctaagcgtctgcgttcaaacgtgcgtgagctggaaggggcgctgaaccgcgtcattgctaacgccaactttaccggccgggcgatcaccatcgatttcgtgcgcgaagcgctgcgcgatttactggcgctgcaggaaaaattagtcaccatcgacaatattcaaaagacggtggcggagtattacaagattaaggtagcggacctgctgtccaaacgccgctcccgttcggtggcgcgcccacgccagatggcgatggcgctggccaaagagctgaccaaccacagcctgccggaaatcggcgatgcgtttggcggccgcgaccataccaccgtgctgcacgcctgccgtaagattgagcagttgcgtgaagaaagccacgatattaaagaagatttttccaatttaatcagaacattatcctcgtgacgctatgaaatttaccgtagaacgtgaacatttattaaaaccgctgcaacaggtgagcggtccgttaggtggtcgtccgacactgccaattctcggtaacctgctgcttcaggtcgcggacggcacgctgtcgctaaccggtaccgatctggaaatggaaatggtcgcgcgcgtgtcgctgattcagccgcacgaagcgggcgccaccaccgttccggcgcgtaaattctttgatatctgccgcggcctgcctgaaggcgcggagatcgccgtgcagcttgaaggcgaccgtatgctggtgcgctccggccgcagccgcttctcgctgtcgaccctgcctgccgccgatttcccgaatctcgacgactggcagagcgaagtggaatttaccctgccgcaggcgacgatgaagcgcctgattgaagccacccagttttcgatggcccaccaggacgttcgttactacttaaatggcatgctgtttgaaaccgaaggtagcgaactgcgcaccgtcgccaccgacggccaccgtctggcggtctgctcaatgccgctggaagagtcgctgccaaaccattcggtgatcgtgccgcgtaaaggggtgattgagctgatgcgtatgctcgacggcggcgatacgccgctgcgcgtgcagatcggcagcaacaatatccgcgctcacgtcggcgattttatcttcacctcgaagctggttgatggtcgtttcccggactatcgccgcgtattgccgaaaaacccggataaacaccttgatgccggctgtgacattctcaagcaggctttcgcccgcgcggcaattctctcgaatgagaaattccgcggcgtgcggctgtacgtcagcgagaaccagctgaaaatcaccgctaacaacccggagcaggaagaggcggaagagatccttgacgtgacctacgccggaacggagatggagattggcttcaacgttagctatgtgttggatgtgcttaatgcgttgaaatgcgagaatgtgcgcatactgctgacggattccgtatcgagcgtgcagattgaggatgcggcttcgcaatctgcagcctacgttgtaatgccaatgcggctttagaaaatatcgggctatcttgcttgttattctggttccgggcagtgctcgcacaaaatacgaagtattttggacgtcctatggacggcccgaagggcaagcgcagcgagcaatcctcacgtactttagtacgctccggttgctgcgcgctggccgaaaccagactaactgcgccgataacgccctggttatgagctgatatgtcgctatcccgactccttatcaaagattttcgcaatattgaaaatgcggatctcgctttatcccccagctttaacttcctggttggcgcaaacggcagcggcaaaaccagcgtgctggaagctatctatacgctcggacatggccgggcgtttcgcagtttgcaaattggccgggtaattcgtcacgagcaggattcgtttgttctgcacgggcgtttacagggcgaagagcgggaaaccgccattggcctgactaaagacaaacagggcgacagcaaggtgcgtatcgacggcaccgatggccacaaggtggcggaactggcgcacctgatgccgatgcagctgatcacgccggaggggtttactttactcaacggcggccccaaatacagaagagcgttcattgattggggatgctttcataacgaagccggattcttcaccgcctggagcaacctgaagcgcctgttgaaacagcgcaacgccgcgctacgccaggtgagccgctatgcgcaactgcggccgtgggatctggaattaatcccgctggcggaacaaatcagccgctggcgtgccgaatacagcgccgctattgtcgaagacatggcggatacctgtcagcaatttttaccggaattcaccctcaccttctctttccagcgcggctgggaaaaggaaacggactacgccgaggtgctggagcggaatttcgaacgcgacagaatgttaacctataccgcccacggcccgcataaagcggattttcgcattcgcgccgatggggcgccggtggaagacaccttgtcgcgcgggcagcttaagctgctgatgtgcgccctacgactggcgcagggcgagttcctgacccgcgaaggcgggcggcgctgcctgtacctgatagatgattttgcctcggagcttgacgatgcccggcgcgggctgcttgccagccgcttaaaagccacgcaatcacaggttttcgtcagcgcaatcagcgctgaacacgtaatggacatgtcggacaaaaattcgaagatgttcaccgtggaaaagggtaaaataacggattaacccaagattaaatgagcgagaaacgttgatgtcgaattcttatgactcctccagtatcaaagtcctgaaagggctggatgcggtgcgtaagcgcccgggtatgtatatcggcgacacggatgacggcaccggtctgcaccacatggtattcgaggttgtggataacgctatcgacgaagcgctcgcaggttactgtaaagacatcgttgttactatccacagcgataactccgtctccgtacaggatgatggccgcggcatcccaaccggcattcacccggaagagggcgtctccgcggcggaagttatcatgaccgtcctgcacgccggcggtaaattcgatgataactcctataaagtgtccggcggtctgcacggtgtaggcgtctcggtggttaacgccctgtcgcagaagctggagctggttatccaacgcgataacaaagtccacaaacaaatttatgagcacggcgtgccgcaggcaccgctggcggtgaccggcgaaaccgagagcaccggcaccatggtgcgtttctggccaagcctggaaaccttcaccaacgtcactgaattcgaatacgaaatcctggcgaaacgtctgcgcgagctgtcgttcctgaactccggggtctctatccgcctgcgcgataagcgcgacggcaaagaagaccatttccactatgaaggcggcatcaaggcgtttgttgagtatctcaacaagaacaaaacgccgatccacccgaatatcttctatttctccaccgaaaaagacggtatcggcgttgaagtggcgctgcagtggaacgatggtttccaggaaaacatctactgctttaccaacaacattcctcagcgcgacggcggtactcacctggcgggcttccgcgcggcgatgacgcgtaccctgaacgcctacatggataaagaaggttacagcaaaaaagcgaaagtcagcgccactggcgacgatgcgcgtgaaggcctgattgctgtggtttccgtgaaggtgccggatccgaagttctcctcacagaccaaagacaagctggtctcctccgaggtgaaatcggcggttgaacagcagatgaacgaactgctgagcgaatacctgctggaaaacccgtccgatgcgaaaatcgtggtcggcaaaattatcgatgccgcgcgtgcgcgtgaagccgcgcgtcgtgcccgtgaaatgacccgtcgtaaaggcgcgcttgacctggcaggcctgccgggcaaactggcggattgccaggaacgcgacccggcgctgtctgaactgtaccttgtggaaggggactccgcgggcggctctgcgaaacagggtcgtaaccgtaagaaccaggctatcctgccgctgaagggtaaaatccttaacgttgagaaagcccgcttcgataaaatgctctcttctcaggaagtggccacgcttatcaccgcgctgggctgcggcatcggccgcgatgagtacaacccggataaactgcgttatcacagcatcatcatcatgaccgatgcggacgtcgacggctcgcacattcgaaccttgctgttgaccttcttctatcgtcagatgccggaaatcgttgaacgcggccacgtttatattgctcagccgccgctgtacaaagtgaagaaaggcaagcaggaacagtacattaaagacgacgaagcgatggatcagtaccagatctccatcgcgctcgacggcgcgacgctgcacaccaacgccagcgcaccggccttagccggcgagccgctggaaaaactggtggccgagtacaacgcgacgcagaaaatgattggccgcatggagcgccgtttcccgaaagcgatgctgaaagagcttatctatcagccgacgctggccgaagccgatctgagcaacgagcagaccgtcacccgctgggttaatcagctgattagcgagctgaacgaaaaagagcagcacggcagccagtggaagtttgatattcgtgaaaacagcgagctgcagcagttcgagcccatcgtgcgcgtgcgtacccacggcgtcgataccgactacccgttggataacgagttcatcaccggcgcggaatatcgccgcatctgcaccctcggcgagaagctgcgcgggcttatcgaagacgacgcgttcatcgaacgcggcgagcgccgccagccggtagccagcttcgaacaggcgctcgactggctggttaaagagtcgcgtcgcggcctctctatccagcgttataaaggtctgggcgagatgaacccggatcagctgtgggaaaccaccatggatccggatagccgccgcatgctgcgagtcaccgtgaaggatgcgattgccgccgaccagctgtttaccaccctgatgggcgatgccgttgaaccacgtcgcgcctttatcgaagagaacgccctgaaagcggcgaacatcgatatctaaaccgtaagctctcccggtaagccacattaccgggatgacaaaatacccaggcccggtaagcgttagcttcaccgggcttttctttgtcggtaaaagaggaatcctcccacgcaatccatcctcgttttctcccgttgcgagagctgttttttgagcggaatcgcgttagcatgagtgaagactcatcttacccggggatcccatggctattaaactgattgcaattgatatggacggcacgctgttgctgccggaccataccatttctccggcggtgaaaaccgccatcgcggcagcgcgcgcccgcggcgttaacgtggtgctgacgactggccgcccttacgctggtgttcatagctacctgaaagagttgcacatggaacagccgggcgactactgcatcacctataacggtgcgctggttcagaaagccagcgacggtagcaccgtggcacaaacggcgttaagctacgatgattatcgcttccttgagcaactctctcgcgacgtcggctcgcatttccacgcgctcgatcgtaatacgctttataccgcgaaccgcgatatcagctactacacggtgcatgaatcctacgtggcgaccattccgctggtattctgcgaagcagaaaagatggaccgtaatattcagctgctgaaggtgatgatgattgatgagcctgccgtcctcgatcgggccatcgcccgtattccggcggaagtgaaagagaagtataccgtgctgaaaagtgcgccgtacttcctcgaaatcctcgataaacgcgtcaataaaggcaccggcgtgaagtcgctggccgatacgctgggtattaagccggaagaaattatggctattggcgatcaggaaaatgatattgcgatgattgaatttgccggcgtcggcgtggcgatggataacgctatcccgaccgttaaagaagcggcgaatttcgtcaccaaatcgaaccttgaagatggcgtcgccttcgccattgaaaaatacgttttagcctaagcgcatttcgggcccggaattctccgggcctcagactgctgacaaagaaggaaaagcgtgggttttccttctttgtggttatcagccgaaaatcaataaattgattttccatgttttttgtctggtgcaatttgtaagtgcaacggttgcatgaggtttgtcatcaatctcaggcccggaattctccgggcctgtcttctcttttttcatgaatagatgttaatccgcatttaaatcccttaatcatcgcaggggattctataagctaccagccccttttaacaatacgttaataactaacatcatattcctatgaataaaaatcactttttgatgttggttgcgctgcctttttcctctcttcaggtctgcgcggccgcagaaccaacaactccacttgaacccgtatacgcctggcacggtagcgaaccggcggatctgcccgcgcctgacaatagccaggccgcggcgccggagtcgacatcggtattgccttttttaggcgatgaagcccgaaagcgcggctacgttctgccactaccttttggtgtcggcgttaactatatgaatatgcggcagaatattaatgtcgatagcattaattttaccggtttatcgttaggtaatttttcactggataacgccttccagattggcgtcggtaatacgcgggaaagcagcaaaaccgagacgcttaagctggatgcctggctgctgccgtttatgaacgtctatggcctggttggacacactaaaggccattctatctcgcaaatcgccgttggcctgaaagggctgaatggcaaagtgatgcctatgccaggtatgcagaatcttgattttcgccttgattttaaaggcactacctacggcgtcggtaccacgctggtgggcggcgttggcaactggttcacggttttagacgccaactatacgcagacgcgttttgatatcctcgacggcagcattgatgcttttaccttttcgccgcgtttgggctatcgtttcaatacgtcgtcggtagatgcgctgcatctgccgaacgggaagctgaatgtctgggtaggcagtatgtatcaggatgtgcagcaggaatttaagggcagcctgaacgatctgtcgatgccgtcgacgatgctgcaaaacatggtcaatctggccaacaagaacggcaatggccgctttgatgtgaaacagcatctgcagtcgccgtggaacgtgctggtgggcgcgcagtatgagatgacccggaactttaatatcactacggagtttggttttgccgaacgtaatagcttctttatcgccggcgagtatcgcttttgagccgaccgtttagcccggtcctgctgctaacctgccttgtttttgggcaggtgcaggcacaggcgctcagccgcgaggaaatcgacggctggttacagaaccttggcgccagcgataagttcgacgccagtaaaggcatcgactggggcgtcatgcctgggccattttatacgccggagctggggcttggattggggacagccgtcgtgggtatgtatcgcccggacctaagtgatgccatcagccagaactccacgctgacgcttagcggctacgtcagctccaccggcgcgtttggcctcagcgttaaaaactatgcctttttcgacaacgatttgtggcggatatttgttgaaggctcgatggccaacactccgacatactattggggacaaggttttcacgccggcgacaaagacaatgataaagaaaaatataccgcccaggtgctgaccctgcgcccgatggtctaccggcagctcatcgataatgtttacctcggggcggggtggtcacttgcggcgcaaaatgccgatgagatggaccatgacgatctgccgaaaatagaaaacactccacaggggccgtcggtattcagttccggcgccagtatcgatatcaactgggacgatcgcgattttgttcctaacccacgcaagggccaatacgccgattttcgctatacccactatgcgccgggactcggcagcgacacgcgatttgatgaatttcgcctgcactatagccgctatcaggccctgagtgataaaagtgtgctggcctgggaagcggatggcaccttcacccagggcgatgtgccgtggagcatgatgccgctactcggcagtgatgaacgtatgcgcggctactaccaggggcgctaccgcgataaaaacgtggtcagctctcagctggaataccgtcgtcagttgacctggcgacacggcgttgttgcctgggtcggcgcgggcactatggggtcatccattgattcactgaatgatgggcgctggctaccttcggcgggcgtcggctaccgctttgaattcaaacctcgcgttaatattcgcctcgactacggtatcggtaagggcagcagcggcttttacttccaggtcggcgaagcgttctaactcttatttactctccttccctgctttgacggcgccatctggcgtggccacaggcatttttatttttatggattgttctttttgtgatctaaattgtagtacaacataatcatgttgtactacattgagctcgtagcgacgatgcctgacatcacgctagtagtacaaaagtgaggcgaaattcagcagcgacggtaaagtagagcagtacacatagagcataaggactctccatgactctcaataagaccgatcgcatcgtgatcacgctgggcaaacagattgtcagcggtaagtacgtaccgggttcagcgctaccggccgaagcggaactgtgtgaagagtttgaaacttcgcgcaacatcatccgcgaagtatttcgctcgctaatggcgaagcggctgatcgaaatgaagcgttaccgcggtgcgtttgtcgctcccagaaaccagtggaactacctcgataccgaggttctgcagtgggtgctggaaaatgattatgacccgcgtcttatcagcgcgatgagtgaagtgcgcaatctggtggagcccgccattgcccgctgggcggcggaacgcgccacctcgagcgatctggcggaaatcgagtcggcgctcaatgacatgatcgccaacaaccaaaaccgggatgcctttaacgaggccgatattcgttaccacgaagcggtgctgcagtcagtacataacccggttttgcagcagcttagcgtggcgataagttcgctgcagcgggcggtatttgaacggacctggatgggcgatgaaggcaacatgccgaaaaccctccaggaacataaagcgctatttgacgccattcggcatcaggatagcgacgcggcggagcaggcggcgttgacgatgatcgccagctcgacacgaaggctaaaggaaatcacatgacggctcgctacatcgcaatagattggggatcgacgaatttacgtgcctggctttatcagggcgaagagtgcctggaaagcaggcactctgaagcaggcgtaacgcgcctgaatggtcgctctcccgctgcggtgttagcggaaatcacccaacattggcgcgatggcgccacaccggtggtgatggcagggatggtcggcagcaacgtgggctggaaaatcgccccctatttgccgcttcctgccgctttctcggatattggccagcagttaactgccgttggcgacaatatctggataattcccggcctttgcgtttcccgtgacgataaccataacgtcatgcgtggggaagaaacgcaactgctgggcgcacgcgccttagccccttcatctgtctacgtgatgccgggaacccactgcaaatgggtactggccgatcgcctgcaaattcacgattttcgtaccgttttgaccggtgagttgcatcatctgttgcttcagcactcgctggtgggcgccggcttaccgccgcaggaagcgtccgctgccgcattcgcggccggtctgcagcgcggtatcaacaaccccgccgtcctgccgcagctgtttgaagtgcgcgcttcgcacgtgctgggcgcgctgcctcgcgagcaggttagcgaatttctttccggcctgctgattggcgctgaagttgccaccctcagcgacacattcgccggacagcaggcgatcggcctcgtcgccgggtcatcgttaacgtcccgctatcagcaggcatttcgcgccattggccgtgaagtcaccgcagttgcgggcgatacggcatttcagacaggaataaggagcatcgcttatgcagtggcaaactaaccttccgcttatcgctatcctgcgcggcattacgccagacgaggcgctggctcacgttggcgccgttatcgacgccggtttcgacgcggtcgaaatcccgctgaattcgccgcagtgggagaaaagtattccgaaggtcgtcgatgcttacggcgagcaggcgcttatcggcgcgggcaccgtgctgcaaccggagcaggtcgacaggctggcggccatgggctgtcggctgattgtgacgccaaacattcagccggaagtgatccggcgagcggtgggttacggtatgaccgtgtgtccaggctgcgccaccgccagcgaagcctttagcgcgctcgatgccggcgcgcaggcgctgaaaattttcccgtcatcggcttttggcccggattacatcaaggcgttgaaagccgtgctgccgtcggaggttccggtctttgccgttggcggcgtgacgccggaaaacctggcgcagtggattaatgccggttgtgtgggggctgggctgggtagcgatctctatcgcgccggccagccggttgaacgtaccgcgcagcaggcagccgcattcgtaaaagcgtatcgagaggcagtgaaatgaaaataaccaatatcaccacgtaccgtttacctccgcgttggatgttcctgaagattgaaaccgatgaaggcattgtcggctggggcgaaccggtgattgaagggcgtgcccgtacggtggaggcggccgttcatgaatttggcgactacctgattggccaggatccggcgcggattaacgacctgtggcaggtgatgtaccgcggcggcttttatcgcggcggcccgattatgatgagcgccatcgccggtattgaccaggcgctatgggatattaaaggtaaggttctgaatgccccggtctggcaactgatggggggctggtgcgtgacaaaattaaagcctacagctgggtgggtggcgaccgccccgccgaagtaattgacgggattaagaagctgcgcggcattggtttcgacacctttaaattaaacggttgcgaagagatggggctcatcgataattcccgcgcggttgatgcggcggtgaataccgtggcgcaaatccgcgaagcgtttggcaatgaaattgagtttggtctcgattttcatggccgcgtgagcgcgccgatggctaaggtattaattaaagagctggagccatatcgcccattatttattgaggaaccggtattagccgagcaggcggaatattatccgcggctggcggcgcaaacgcatattccaattgccgccggcgaacgtatgttctcgcgctttgaatttaaacgggtactggaagcgggcggggtggctattttacagcccgatttgtcgcacgcaggcggtattaccgaatgctataaaattgccggaatggcggaagcctatgacgttgggctggcgccgcactgcccgctggggccgatcgcgctggccgcttgtttgcacgtcgatttcgtttcacataatgcggtcttccaggaacagagcatggggatccactacaacaaaggcgcagaactgcttgattttgtgaaaaataaagaagatttcaatatggaaggcggcttctttaaacctctgatgaagccggggctgggcgtggaaattgatgaggcccgcgtgattgagttaagtaaaaatgcgccggactggcgaaatccgttgtggcggtatgaggatggctctgtcgccgaatggtaaatgcgcgtcatacttcgcactggtgatgcgttggctgcattttcttaccctggtcacatactattgtatgctcccagggatgcgaaaatttgccgcctttccccagcacgagttatttagcgcatcgcaacgtagttattaataaaaaacataaacaccctctgtaaattaccgggcatggtgagcggcttcgctatgcccaaaatctggagacagattgcgatggatatttcagttaccgctgtaaaacccgggcgtcgccgttatctgacgctcatcatgatctttattaccgtggttatttgttatgttgaccgcgccaacctcgccgtcgcctcggcgcatattcaggaggagtttggtattagcaaagcggaaatgggctacgtattctccgcctttgcctggctgtataccctctgccagatccctggcggttggttccttgaccgcgtgggatcccggcttacctactttatcgctatatttggctggtccgtggcgacgttgctacaaggcttcgccaccggcttgatgtcgctgattggattacgcgccattaccggcatctttgaagcgccagccttcccgaccaacaaccgcatggtgaccagctggttcccggagcacgaacgcgcctccgccgttgggttttatacctcgggacaatttgtgggcctggccttcctcacgccgctactgatctggatccaggagctattaagctggcactgggtatttatcgttaccggcggtatcggcattatctggtcgttaatctggtttaaggtttatcaaccgccgcgcctgactaaaagcatcagcaaagccgagctcgactatatccgcgacggcggcggcctggtggatggcgatgcgccgctgaagaaagaggcgcgtcaaccattatccagagcggactggaagctggtctttcaccgtaagctggttggcgtttaccttgggcagttcgcggttacctcgacgctgtggttcttcctgacctggttcccgaactacctaacccaggaaaaaggcatcaccgcgctgaaggccggttttatgaccacggtgcccttcctcgccgcgttttttggcgtcctgctctccggctggctggcggataagctggtgaaaaaaggttactcgctgggcgtagcgcgcaaaacgccgattatctgcgggctgctgatctccacctgcatcatgggggcgaactataccaacgaccccgtctggatcatggcgctgatggcgctggcattcttcggcaacggctttgcgtctatcacctggtcgctggtctcctccctggcgccgatgcgcctgatcggcctgaccggtgggtgtttaactttgttggcggactgggtggtatcaccgtaccgctggtgattggttatctggcgcaggattatggctttggtccggcactggtttatatctccgtggtggcgctgatcggcgcgctgtcttatatcctgctggtcggcgatgtgaaacgtgtaggctaaatttttgcgatacgataccctgatgcgtaagtctcgcatcagggtatcgtcatgaaacaagtcacttttgctccccgtcaccatcagcttactaatatcaatacctggaccccggacagccagtggctggttttcgacgtgcgcccgtcgggggcctctttcaccggcgagaccattgagcgggtgaatatacatagcggcgccgttgagacgctctatcgcgccgctgacggcgcctgcgttggcgtggttaccgtacacccgacgcaagataaatacgtttttattcacggcccggaacacccggatgccaactggcattacgattttcatcaccgtcgcggggtggtgaactggcagggtgaaacccgcaatctggatgcgctggatattaccgcgccttataccccggcgcgctgcgcggcggcagccatgttcatgtcttcagccctgacggccagttcgttagcttcacctataacgaccacgtactgcacgagtacgatccggcgctggatctgcgcaacgtcggcgtggccgcgccctatggccctgtgagcccgcagggcacgcatcccgtgaatatgccggcagccactggtgcgtgctggtgagccgtaccacggcgaacccattgccgggcagcgatgagatcaatcgcgcctatgaagagggatgggtgggtaatcatgccctggcgtttattggcgatacgctggcggaaaacggcgacaaagtgcctgaactgtttatggtgacgctgccgcggaatgaggcgggctggaagcggcagggcgatatgccgctggccggtaccgcaacgacgatgcccacgccgccggcaggcatcagccagcgccgtttgacctttacccaccagcgccgctatccgggctggtgaatgtaccgcgtcattgggtacgcgccaatccgcaggccaccgagatcgcctttctgatgcgtgatgacgcaggcgttgtacagctgtggcttatcccgccagagggtggtgagccgcgacagctgacacatacggcaacgggcatccagtcagcatttaactggcatccgtcgggcgcgtggctgggatgtgtggtggaaaacaaaatcgcgctctgcgatgcccgcagcggcgcggtaagttatttgacgaccgatcgcgaaaatccgccgtccgcggatgccgtcgtattttcaccggatggaaaatacctggcgtggatggaagacgtcgacggttatcgtcagttgtggataaccgaaacgcagcgctagcttagcgcgaaggcattggcgctggcgggatgacggagttggtcgccagcgtctcctgctcgcttttctcgacgcgcgattttaccgagctgtcggtgcggaacatatcccacggcagcagtagcgtatccatgaccgcggtgaacggcatatcaagggccaccagcgattttacgccccagttggtgtcgtcgtcgcccagcgtatgggcgctggagcgcgtgcctgggtaggttccttccttgccgccggtatgcgacatcacgctggagcaaccgcccacactaatcatcccgctgaacaggaccagctttaacaatccgcttttcatcactcttccgtcattttatcggggttacttcggttataacgagccgtcccgtgaatgcctagcgttattgcactgcactgtggcgagtatcgcactttgccttttgtgctttgcaaccagtctaagcattcgccagcaaactgcaaaaaaatttggccgaaaagggcttgaaaagcatcggggcacacccattttagtagtgtcacccaatgaggatacgcctgaggggtattccgggtcataacggcttgtccatgatggaaagccattgaattctcgctgatttcaggagctatttactatgcgtaatttcgatctctccccgctttatcgttctgctattggtttcgaccgtctgttcaacctgttagaaaataatcaaagccagggcaacggcggctaccctccgtataacgttgaattagtagatgaaaacaattaccgcatcgcgattgccgtcgccggttttgcggaaagcgaattagagataaccgcgcaagacaatcttctggtggtgaaaggctcccatgccgccgagcagaaagagcgcacctacctgtaccagggtatcgcggagcgcaacttcgagcgtaaattccagctcgccgacaacattcatattcgcggcgcgaacctggtcaacggcctgctgtatatcgatctggaacgtgtgattccggaagcgaacaaaccgcgccgtatcgaaattaactaatcgtcctcttcaggccgcgcggcggcctgaatatataacttgctcgccgtcagggagcaaatgcgaattcgctgaattcgcaggtacttactcgcttctcagaaggagaaaacactatgcgtaactacgatttatccccactgctgcgtcaatggatcggttttgacaaactggctaacgccctacaaaccgccggtgaaagccaaaccttcccgccctataacatcgaaaaaagcgacgataaccattaccgtattaccctcgcggtagccgggttccgtcaggaagatttggatattcagctggaaggtacgcgtctgaccgttaaaggcacgccgcaggccgctgaaaaagagactaaatggttgcaccaggggctggtgaatcaggccttcagcctgagtttcactcttgccgacaatatggaagtctccggcgccacctttaccaatggcttgttacatatcgacttaacccgccacgagccggaagtcgtcgccccgcagcgtatcgccattagcgagcgcccggcgctgaatagttaattaagcaatatcgctttcaagccccgataactcggggcttttttgtgcgcgaaagcgcattaaatcaccttgctgcaaaagatgtttcagtttaaaagtgaatgcttgccatataggcttattaaaacaatggatatgttatgaatgaacggcagtcacttgaagtgaggggagcggccacccgtttcagtgatgctgttaacagctattatgataaatgaagcagggagcgatatgtactaccggaatgaagttcagggatattttaaaaataatagaatcttagctttgaaatttgatagggctctgtccagtgtcagggtgggggtgtcaaatcagattgaaatgataggttcaggagctaaaagagcgttgtattattcctcatgctttaccagtgaatatcagggtgtctgcaagcaacaaaagcaagaggatataagatttacaataggtcttggtcgtgttattgaaggggatagtgtggtttttgaaatggttaaggtttattttgatgagatttttaagtccaaaacgacacagcaattagaaaaaataaaaaaaatcctcatgactgtaaatattcacatagcagcaagcaccttgacacaacagggcttttctctgggggtggcatcggctgtcgcagtaagtacaaatgtaagctttagcatgagtgcattaaccggtcgggctgctggtatagctgttgggattgctggagcatatggcattgtacaaaaagctgctgagagtgctaatcaactgcgctcgcttcatccatggtattattttgcattatattcaaaggggctggaaatgatgtattttcttgtctcatctatatttgaaagggccggtgcatttagagtgcatcaaatctctgatgatgatattgctgatattattaaacgaatgattaggtagatgatatggggtttgttaagtcacttttgaaacgattttttaaaacgttaatatcagcttatgttccagctttgttgattgttatattcgccgttgtgtttttcagatttttccctgaaggtcctgtttggcctgtgggggtatttgttatttttattatttatgtctttgcccgctatgttaagtaggatgtattttaatgatgaggagcttcaataacgatcgattcaaaatccgcaggcccctcgggtcttctacgcaaagcgcaccttgcagcggcgtccctaccgcacctgtcgagtaaaaagtgctgcaaaaaagaaagatgctcccgagtagcggagctactccgcaattattgtgcgccatgcggcatacaacccacccggcagcagtcataatccctgttaataataatgttattcacagggaaaatagtatgagtgatatagcattgaccgtcagcgtgttggcgctggttgcggtagtgggattgtggatcggcaatgtcaaaatccgcggcgtcggttttggcatcggcggcgtactgtttggcggtattatcgtgggccacttcgtggatcaggcagggattacgctgagcagcccgatgctgcatttcatccaggaatttggccttattctcttcgtttataccatcggtattcaggtcgggccgggcttttttgcctcgttacgcgtctccggacttaagctcaatctgttcgcgatccttatcgtcgtacttggcgggctggtgacggcgatcctgcataaactgttcaatattccgctgccggtggtgcttggtatcttctccggtgcggtcactaataccccagcgcttggcgccggacagcaaatcctgcgcgatcttggcctgccgtttgatgtcgtcgatcagatggggatgagttacgcgatggcctacccgtttggtatctgcggcattttgttgaccatgtggctggtgcggctgttctttcgcatcaatgtggaaaaagaggcgcagcagtttgatgagagcagcggtaacgggcacgctcatctgcacaccattaacgtgcgggtggagaacccgaacctgaataatatggcgattcaggatgtgccaatgctcaacagcgacaaaattatctgctcgcggttgaagcgcgatgagctattgatggtgccggcgccgggtacgcttatccagcatggcgatctgctgcacctggtcgggcggccggaggatttacacaatgcgcagctggtgattggtaaagaggtggcgacttcactctcaacgcgcggaaccgatctcaaagtggaacgcgtggtggtcactaacgagaaggtattagggaagaaaatccgcgatctgcactttaaacaacgctatgacgtagtgatctcgcggcttaatcgcgccggggtggagctggtggccagcagccatgccagcctgcagtttggcgacattcttaacttagttgggcgtccacaggccattgacgcggtggccaatgaactcggcaacgcgcagcaaaagctgcaacaggtgcagatgctaccggtgtttatcggcattggtctcggggtgctgctggggtctattccgctgtttattcctggtttcccggcggcgttgaaactagggctggccggtgggccgctgattatggcgttgattctcgggcgtatcggcagcatcggcaagctgtactggtttatgccgccgagcgctaacctggcgctgcgcgaactcggtatcgtgctgtttctggcggtggtggggctgaaatccggcggcgattttgtcgataccctgcttcacggcgaggggctaagttggatcgcctacggtattttcatcaccgctatcccgctactgacggtgggcatactggcgcggatgctggcgaagatgaactatctgaccctctgcggcatgctggccggctcaatgaccgacccgccggcgctggccttcgccaacaatcttcacgccactagcggcgcggctgcgctctcctacgccacggtttatccgctggtaatgttcctgcggataatcacccctcagctactggccgtgctgttctggggctgagttagtgggctctgtgcctggacccggcgcaggtggtaatccacctgatactcgctggcgttgcggaacattaccgaatagttaagaaattcgccgctatcgctgtaggaaagcgaggtaatgcgcagcagcggcgtctgctccggcacgttcattgagcgggccaactgtttatccgccagtaccggggtgagggtttcatagttgccgctgatggtaataccgcattctttctcgatatagtcgaacttcgacccctccagatgacccaacgacagatggcggaacagtttaaccggcatataactgtcctccagcattagcggtttaccatcgacgtagcgcacccggcgagagaaatagatccgttcatcaattttaatccgtagctggctggcgatggccggcggggcgggcatcacttcgaatatcaacactttactcaccacttctttaccctgctggcgcagaacttccgccagcccggtcaggttgctggtctcatggtgtacatctttgcgtgcgacataggtaccggagccgtggcggcgcaccactaatccactttccaccagcaggttaatggctttgcggatggtcatgcgcgccacactgaactcctgcgccagttttttctcgcccggtagcgggctaccaatgttgaaatcggaagagttgagccgtaaacgcagtttgtcagcaatagatttgtagatcaccagtagacctctattcgtcattgatgaatcagcgatagtcagctgaggtgaattttaaattcataaaaaacaataaaataaaaactatcgatgatgttgatttcatcacgtcaattcatcgtgtctatgttttatgcaaaaagtagacaacattgaccgaattaaaaccatgaatgcgatcacgaatcgcagcggcgcagcatgttgccgacggggcgaattcctatgctcgaagcaggccggtaaagaacaaaaaaaggccacttaccctacgagttgttacatgaggattttcaaatgctcagtcaaatacaacgttttggcggcgccatgtttaccccggttttgctgttcccatttgccgggattgtggtgggtatcgccattatgctgcgtaatccgatgtttgtcggcgaagcgctcaccgcacccgatagcctgttcgcgcaaattgttcacatcattgaagagggcggctggaccgtctttcgtaatatgccgctgattttcgccgtcggcctgccgattggcctggcgaagcaggcccagggccgggcctgcctggcggtactggtcagttttcttacctggaactacttcatcaacgccatggggatgacctggggccacttcttcggcgttgatttcaccctggatcccacggcgggaagcggcctgacgatgattgccgggattaaaaccctggataccagcattatcggagccatcgttatctccggcatcgtcaccgcgctgcacaatcgttacttcgataaaccgctgccggtgttcctcggtatttttcagggatcgtcgttcgtggtgatagttgcttttctcgcgatgatcccttgtgcctggctaacgctgctcggctggccgaaggtacagatggggattgagtcgctgcaggctttcctgcgctcagccggcgcgctcggggtgtgggtttacatctttcttgagcgcattttgatcccgaccggcctgcatcactttgtctatgggccatttatctttggtccggcggtagtggaaggcggcatccaggtctactgggcgcagcatctgcaggattttagccagagcgttgaaccgttgaaaacgctgttccctgagggcggttttgcgctgcatggcaattcgaaagtctttggttcggtgggtattgcgctggcgctttacttcaccgccgcgccgcaaaaccgggtgaaggtcgctggtttgctgatccccgccaccctgaccgcggtgctggtgggcattaccgagccactcgagtttaccttcttgtttatctcaccgctgctatttgccgtgcatgcgctgctggcggccactatggcgacggtgatgtatgtctgcggcgtcgtggggaacttcggcggcggcctgctcgatcagttcctgccgcaaaactggatcccgatgttccatcaccacgcgtcgatgatgtttatccagataggcatcggcatctgctttaccggtatctacttcgtcatctttcgcaccctgatcctacgcctgaatctgaaaacgccgggtcgcgaagacagcgaaatcaaactctacagcaaagcggattaccagacacgcggcaaaaccagtgtggcggcagctgcagaaaacaaattaggtcaggccgccggcttcctgcaggcactgggcggggccggcaatattgaaagcatcaataactgcgccacccgactgcgtatcgcgctggtggatatggcgaaaacgcaaagcgacgaggtgtttaaagcactcggcgctcacggcgtggtccgccgcggcaacggcatccaggtcattgttggcctgcatgtcccgcaggttcgcgaccagctggaaaccttaatgaaagattctttatcgaccgaacacaccaccatgacggaggcagtatcatgaaaaaattctcagttgttatcgcaggcggcggcagcacctttacccctggcatcgttctaatgctgttggcaaaccgcgatcgtttcccgctgcgggcgctaaaattttatgacaacgacggcgcgcgtcaggagactatcgccgaagcctgtaaaattatcctcaaagaacaggcgccagagattgagttcagctacaccaccgacccgcaggccgcctttagcgatgtcgacttcgtgatggcgcacatccgcgtcggcaaataccctatgcgcgagcaagatgaaaagattccgctgcgccacggcgtattgggtcaggaaacctgcggaccgggcgggattgcctatggtatgcgctctatcggcggcgtgctggagttggtggattacatggaaaaatattcgccaaacgcctggatgcttaactactccaacccggcggcgatagtggctgaagccacccgtcgcctgcggcctaatgcaaaaattcttaatatttgcgatatgccgatcggcattgaagggcggatggcgcaaatcgtcgggctgaaagaccgcaaacagatgcgcgtgcgttactacggccttaatcacttcggctggtggacctcgattgaagatctcgatggcaacgatttgatgccgaaattgcgcgaatatgtggcgaaatacggctatgtaccgccatcaaacgactcgcacacagaggccagctggaacgatacgtttgctaaagcgaaagatgtacaggcgctggatccgcaaacgatgccaaacacttacctgaaatattatctgttcccggattacgtggtcgcgcactccaacccggaacgtacccgcgcgaatgaggtaatggatcatcgggagaaaaacgtctttagcgcctgccgggcgattattgccgccgggaaatcttccgcgggcgatctggagatcgacgaacacgcgtcgtatatcgtcgatttagcgacggctatcgcctttaacactcaggaaagaatgttgttgattgtgccgaacaatggcgcaatccataattttgatgccgacgcgatggtagagatcccttgtctggtcggtcataacggaccggagccgctgacggtaggcgatattccgcacttccagaaagggatgatgagccagcaggtggcggtggaaaaactggtggtggatgcatgggagcagcgttcctatcacaagctgtggcaggcgattacgctatcgaaaaccgtaccgagcgcctcggtggcgaaagcgatcctcgatgacctgattgccgccaataaagcgtactggcctgagctgcattaaccctcgctttaccggcatccatcgggtgccggttcttctctcctgttcgtgatttaggctatgctgtggcctgtttgcgtgacgaacaaggactgctgatgaaaatttcccgcattggcgaagcgccggattaccgcttttcgctggccaatgaacgtacctttctggcgtggatccgtacggcgctcggctttctcgccgcgggcgtcgggctggatcagctggcgccggatttcgccactccacttattcgcgaagtactggcgctgctgctatgcctgtttgccggcgggctggcggtgtacggttatctgcgctggttgagtaacgaaaaggcgatgcgcctgaagcaggatctcccttatacccgtacgctgctggtgattagcgtcctgctgctggcggtcgtggcggcggtgatgctgctggtgctgtatggcggataaacgccgggcgcggcgggagaatgatcccggtctgcagccggagcgcacctcgctggcgtggtttcgtaccctattgggctatggggcgctgatggcgctggcgattaaacataactggcatagcgccgggctggcgttctggatatcgattggcgtactggcagtggtggcgatcattctctggcgctacactcgtagccgccatttaatggatgttgccgagagcgattttttgcagccgggagcagttcgtgacaaatttttgatctccctcgcagtgctttcgctgtcattattgtttgctgtaacgcatctacggcagatcattttatttcttaaggatgtgacatgacaggatgtcggacagaatgccactccctcgatcacaacgaaccggcagtgcaggaggtgaaagtttatcgccaccactgccagcgaccacagcagttctatcgggagctacgcgctcagggcgtgcgtgccgtacgttttattccgcagctcatggcggaagatgccaatgcgtggggaaacttcctttgcgccattttccacatctgggcacgggaagatattggccgcataacgattacgctgtttgaggaaaccctgcgtatctggtgcggcgaaccgctgcgcgaacaacggcaggtggccgccaatagcgcctgttttgtctgtgcatggcggcgattatgcgcaggcgacgacgatccgctctgtgaaggctaccgccagttctatgtcgccagcgcgccctgtatgcgggtcatgcgcgatctgcgtaaacagcagcggtcaccgggcgaactgatgccgctgctgcgggcgatttaacgccccttcgccagatactgcgccatctcttcttccggcaccatgccgccgccggtcgcccataccaggtgggtggcgtggcgtagctgttcgtcgctcaaaccttgtagctgatggtacgctttactggcgcagacacgctgcggcccggccatcccggcgagggcggacggctcaaggcgaatattttccgccgttgccagccagcccagcatgtcgtacatcgtttgatcgtcgagggtgtacaggccgtcgagcaggcgctccatcgcccggccaacgaagccggaagcgcggccgaccgccagaccatcggcggcggtcaggttatctatccctaaatcctgcaccgcaatctggtcatggagcccggtgtaaatgccgagcagcatacatggtgagtgggtcggttcggcgaacagacagtgaacgtggtcaccaaacgccagtttcaggccgaatgcgacgccgccgggccgccgccaacgccgcatggcagatagacgaacagcgggtgatcggcatcgaccacgcgtcctgcctgggcaaactgcgctttcaggcgttcgccggccacggcatagccgaggaacagcgtgcgcgagttttcatcgtcgatgaaaaaacagttcgggtcggattccgccgccttacgcccctgttcgaccgccacgccataatcttcttcatactcaacgaccgttacgccgtggctgcgcagtttggcctttttccatgcgcgggcatccgccgacatatgcaccgtcaccttaaaaccaatgcgtgcgctcatgatgccgatcgacataccgaggttgccggtagaaccgacggcgatgctgtactggctgaagaactgcttgaattgcggtgtcagcaatttgcgataatcatccgcgatggtgagcagtccggcttccagcgccagcttttccgcatgggtcagcacttcataaatgccgccgcgtgccttaatggaacccgaaatcggcaggtggctatcttttttcagtaacagctcgccgtgaatcggctggttgaatttttgctcgaggcggcgtttcattgccggaatggcaaccacttctgattcgataatcccgccggtggcggccgtttccggaaaggcttccgccagatacggcgcgaagcgctgcaggcgttcgtgagcgtcttttacatcttcggcggtcaggccgacatagggcaaaccttgcgccagcgtcgtcgtcgccggattaaaccaggtggtttctttcagcgcgatcagctcctgcacaagcgggaaggtcgcggttaattgggtcaggtcagcgtttttcatattacgtctcgttcgcttagatgatgaaagaaagcaggaaggtggcggcgagtgcaagtaaagaagcgataaatgtcgccgtcgtataatacttgaacgtttcgctgaggcttgcgccacagtattgtttcaccagccagaacagggaatccgtcacgatcgtgcagccaatcgcgccggaaccgatggcaatagcgatgatctccggacttacgccgggatacagcggcagcatccgcgcgacgatagcggtggcgcccatcatggccacggtagcggaaccgacggcggcgtgaaggatcagggccaccagccaggccagcagaatcggatgcatatgcagattcgagaggatcaccgccaggctatcggccaggccgctggatttcaaaatcgcgttgaacgcgccgcccgcgccaataatcagcagaatattagcaatcgatccgaagccgttttcagtatgggtcagcaggacgcccatccccatttgccgacgaataccaagaatgtaataagcgacaaagacggcaataaacatcgcggtgatcgggttgccgataaactccagcaacatatacagcgtgccgcctttagccatattcaattcagcgacggttttcaccagcatcagcccaatcggtagcagcacggtaaatagcgtagcgccgagcgagggcagcgtcgattcttcgcgtacttcaaggttagaaaactcggtcggcaccggtttaaacggcaggcggttgccgagcagcttgaggaacaatgggccgccaaccagcgaggcaatcaggcccaccagcaggccatagacgatgaccgtaccgatatctgcgccgagtttattcgccacgaacagcgcggccggatgcggcggcaccacgcaatgcaccgccatcagcgcggtacacagggggatggccagcttcagcagcgaggtattggtttttttggcaatggagaacgccagcgggattagcagcaccacgccgacttcaacaaacagcgtaataccgcagatcaggccaaccagcaccataattacgtccgccgacaaccagcgacagcgctgcagcgccaggccgatgcgttccgccgcgccggagacttccatcatcttcccgaggatggtaccgagaccgatcaccgccgccaggaaaccaagcgtaccgccaataccgctctcaatggcgttgaccatatccagcggccccatgcccatcatcgtgccgacgaaaaagctcgccagcaggagcgccagaaacggatgaaacttcagtttgacgatcgttaaaacgattaacacgatactgataaatagcgtgcataccacccagatttgagattccataccccacctcgccgtaaataacgtgtggttattgaacagaaaagcgacataggctgacaaacgatataaatcgcctttcaggtgagccagattgatgcaaaagcgtgatttggttcttaaatagaccgttaattgtgtattgggtcacttttattcatctttcaggcgcgctccggctgcgttttttttacacttaccggcaaagaaaaggcggggaatcgtgatggatgtgatgaaagagatgggtaatcggctgctgaacggctggcagttgtcaaagctgtatacctttgaagtcgcggctcgccatgagtcctttgcactggcggcggaagagctgtcgctgacgccgagcgccgttagccatcgcatcaaccagctggaagaagagctgggtattcagctatttatacgttcgcaccgcaaggtggagctgacccgcgagggcggcgggtattctgggcgttgaaatcctcgctggatagccttaaccaggagattctggatattaaaaatcagaagctctccggcacgctgacggtgtactcgcgcccgtcgatcgcgcagtgctggctggtaccggcgctgggcgatttcactcgccgctatccgtccatttcgctgactgtgctcacgggcaacgataacgtcaatctacagcgtgcgggtatcgatctggcgatctattttgatgatgcgccgtcatcacagctaagccatcattttctgatggatgaagcgatcgtgccggtatgtacgccgaattacgcacaaaagcaccagttaatccacaatccgggcaatctgcgctactgcactttactacatgaccgccaggcatggagcaatgattccggtaccgatgagtggttcagttgggcgcagcaatttgccattgaattgccgcaatcgtcgggcatcggtttcgatcgttccgatttagcggtgattgcggcgatgaatgatgtcggggtagctatggggcgtaaacgactggtgcagaagcggttagaaagtggtgagcttatcgcgccgttcggcgacatgacgctgaagtgtcaccagcactactatgtgacgaccctgccgggccgtcagtggccgaaaatcgacgcctttatcgaatggctgcacagcctgacataaggcaaaagcagccaccgggggagcgccagcggcgcttagaccggctgctggtggctggtaaagcgcgaggccagcggcagccagcacagcagaatcaacagccccattaacatcatcagcaggccgaggctgctttgtccggtttgcggcatcattgccgacagccaggccagcacgccggagccgatattctgcaggccgccaaccagcgcgccagcggtaccggcgaggaacgggaatggttccatcgcgccgctggttgccagtgggaacaacatacccgcgccgaagaaaaacagtgccgcaggcaccagcaatgtccagacggtcataatgccgaacagccccggcaaccacatcataattcccgccagcaggcagcagataaccgactgccacatcagcgttgagaagcgtttattaggacgtcctgcgaaccacgcgccgaagaacgccgccgggatcggcagaataaacagaatactgaccgccatactgctcaggccgagcaccgcgcccatcagcacgccggaacaggcttcgaacaccgcaatcccggccagtccgcccaccagcatcaacaggtaacagttaaaagcgccggtaccgaacaatgttttgtagctggccagtagtttcgtccgcggcgcgccttgcgggcgcgtttccggcatccatttcgccatactaatcgtcacgccagcgcacagtatgagcaggaaagcgtagcaggcgcgccagttccacagggtatcaaggatgccgccgagcagcggcgcaatcagcgggctaaccagtattcccatatttaacaaactattggcgtgacgcagctgcgcgccttcatacaggtctcgcggcagggtgcgcgccatcacgccgccgacgccggtgcccatcccctgcatggcgctggcggcgatcaataccggcaggctatgggtagtgatggcaaccagcgtcgccagcataaaaatagacatcccgacgaggatcaccggacggcggcccacgcggtcggagagcgggccgtagaacagctgggaaatgccgtacgtcaggagataggccgccatcacgctttgtaccgcccttcgcggacgttaagcgataccgccatgtcggcgatagccggaatataaatggtctgcgccatctggccaacggccaccagcagtaccagcatcaacaacaaattgaagttcttatgccgtttcatgtcgatgaatacttcgtgagcaatgagaaatgaagaatatgtgactggcacaccccttaaacgatggaggaatctaccacaataaaatgacagaacaactacatagcaccgattgttggggaaaattcaggcaggttttgtaaacaggatcggcaactaatgttgccattttaatctatgagaggcgcagcaggattgctccagcggcaataccacaggcggcaacgatgcgcagcgctaccacttgttccttcaggacgataaacgcgatcagcgcgccgaacagaatggaggtttcacgcagagcggcgaccaccgccagcggcgcctgagtcatcgcccatagcgccaggccgtaggatcccatggtgccgacgccgccgaggattccctttttccagtgttggcgtaaataacggctggcttcgcgccgccgcgccaccatcgcccagcacagcaggcagcaaccgttcataaaaaaggtccacagggtatagccgagcgccgatcccgccagccgtaccccggtgccgtccaccagcgtataacccgcgataaaacaggcgttgatcagcgccagcatgatgcctttgcgggaactgacgcggccgttaaaggccatcgccagaatcgccaggcagatgacgccaatacccaaccaggccagcggcgataagcgatcgccgagaaatatcacgctgatagccgcgaccagcaacggcgcggtgccgcgcattagcggataggtctggctcatatccgacacctgataggtcttcgccaccagtaccgtatacaccacctgcaatgcacatgacgccaccagataaggggcgctggccagcgtcggctgcggcgcgaaggggagcatcaccagggcgatcagcgaggccgacccgctgacgcttatcgccgcgtacattttatcgccgctggctttgacgatagcgttccagctggcgtggagcagtgcggcgaaaagcaaaatgcagaatacggtgatggtcatcgcaggcagattcagcagttaaggtcagcggactgtaacacgcgcccgctgcgccaaccagccacgcttacagcgagcagaacaggcgatgcgtgacccgcggctcatcgtataccgggcggaaaccaaagcgttcataaaagggccaggcctgcaccggagcatgagtgttaagaaaatcgaaccaggcgccggaatgcgtgatgaccgagaccagcagctgctggccaattccctggcggcgatggctatcgcgaatatagagatggcgaatgcgcccggcccgcggctgctggctgaaggggtcgacgttcagaccgcagaccccaactaactggccacggacgaacgcgcccagcagcttttcaccaggggcgttaaagcggtttttgccgctttgccagttttccgccagacggcgcagcatattgaagtgctgttcaaggctttcggagcgcagcgcaacgaaccccggatcctccggcgttgttgcggcaattaatagcggtggcatggttcctccatcaagtcttcccggaacgcccgaaggacgcctgtaggggggcggtttcccgccccctcaggtgcgacttgaacctgaatcagcggaactgcttcaggactgcatcaagtagttgcaacacagcaaccatgagtttcaggattaaaataataatatccattccgcccatacgcgcgtctcctgtggttaaggagcacaataagctgacgtacctttccgctgcctgttgccagcttatccctgttctcacaggggttgcgtagtgatggccgtacgggccggacacgacgcattgttgacgtaacacagtgtgctctctcggggttaaggcactgacggcaccacccgtttcagccaggacttcgttgcgccggtcaaacttgcggcccccgaatggcacaaagtgaacacatccagtatagataaatactgtatgtatgaacagtattttttggacaaattcgcgcccgtcgtccatactctatgacagagaaatttcgaccttaaattgcgcgaattgcagcgatcgcgtatacttttgtcgttgacgtaatacagtgtgcttgcggctaccacccgtaaaaatgctgataaaaacctcgctccggcggggttttttgttttctgccgctaatgtcgcaaattgtgatctttcgcgcaaattctcgtggatgaaaataaatccattgtgaaaacgcaaaacctgtgtttgtataaattcagcttatttttcgacacaacaggtccctaatgaacgctgccatgatgacttcgaccctactaaaaaccgcgcctgccgcggtggtcgtcgtgtctgtggtggtcgtcgtcggcaatgcgccgtagggtccggaacaacacgaattccaaaccccgccggcgcaaaccgagcggggttttttgttggcgagcccccggtaaagtcggcccagaataaaaggactggagcatggcaagttcgggcaccacatcaaacacaatgcgctttaccggcgcgcaactggttgttcatttactggaacgccagggtattactatggtcagcggtattccgggcggctccatcctgcccatctacgatgccttgagccaaagcacgcagatccgccacatcctggcgcgccacgagcagggggcgggttttatcgctcaggggatggcgcgtaccgaaggtaaacccgcagtctgcatggcctgtagcggtccgggcgccaccaacctgattaccgccatcgccgatgcccgcctcgattctattccgctggtctgcatcaccggccaggttccggcctcaatgatcggcaccgatgccttccaggaagtcgatacctacggcatctctatccccatcactaagcataactacctggtgcgcgatatcgccgagctgccgcaggtgattagcgacgccttccgtattgcccagtccgggcgccccgggccggtgtggatagatattcctaaggacgtacaggcggcaaccattgaactggaaacgctgcctgagcctggcgagcgcgccccggcaccggcattcgcgcctgaaagcgtgcgtgaagcggcggcaatgatcaatgcggcgaaacgcccggtactgtatctgggcggcggcgtgattaacgcgccgcagccgattcgggacctggcggaaaaagccaacctgccgaccaccatgaccttaatggcgctgggtatgctgccgaaggcgcaccctctgtcgctgggcatgctggggatgcacggcgcgcgcagcactaactttattctgcaagaagctgatttattgattgttttaggtgcgcgttttgatgatcgggcgattggcaagaccgagcagttctgcccgaacgcgaagataattcacgtcgatatcgaccgctctgagctgggcaaaattaagcaaccgcacgtagcgattcagggcgatgtggcggaggtcttagcccagcttattccgcagattgaggcgcagccgcgtgatgagtggcgccaactggtggctgatttacaaagagaattcccctgcgccattccgcaggaaagcgatccgctctctcattacggcctgattaacgccgtggccgcctgcgttgatgatgaggcgatcatcaccaccgatgtgggtcagcatcagatgtggacggcgcaggcctatccgctcaaccgtccgcgccagtggctgacttccggtggtctcggtaccatgggcttcggcctgccggcggccatcggcgcggcgctggcgaatccacagcggaaggttatttgcttttctggtgacggtagcctgatgatgaatattcaggagatggccaccgccgccgaaaatcagctggatgtaaaaattatcctgatgaacaacgaagcgctggggctggtgcatcagcagcagagcctgttctatcagcagggagtcttcgcagcgacctatccggggatgattaactttatgcagatcgccgccggttttggtctgcaaacctgtgatttaaataacgaatccgatccacaggcggcgctgcaggcgattatcgaccgcccaggtccggcgttgatccatgtgcgtatcgacgcgcagcaaaaagtgtatccgatggtaccgccgggtgcggccaatactgagatggtgggggaataagccatgcaaaagcaacacgataacgtcattctggaactcaccgtccgcaaccaccctggcgtgatgacccacgtctgcgggctatttgcccgccgcgcgtttaacgttgaaggcattctctgcttgccgattcagggcagcgagcatagccgcatctggctattggtaaatgatgaccagcgactggggcagatgattagccagattgaaaaactggaagatgtcaccaatgtggcgcgtaaccagtccgatcccaccatgtttaacaaaattgcggtgttcttcgaatagcgctcaaggcttgaacagctacgcgcttaccgctaaggtaagcgcctttgccggataaggcgtttacgccgccatccggcgctttcaggcaccaggaaacaccatgactaccatcgcccttattgacgatcatttgattgtccgctccggttttgctcagctactggggctggaagctgattttcaggttgtcgctgaattcggctgtggacgcgaggcgctggcggggctaccgggacgcggtgtacaggtctgtatctgcgatatctcaatgccggatatttccgggctggagctgttaagccagttgccgaaggggatggcgaccatcatgctgtcggtgcacgatagcccggcgctgatcgagcaggcgctgaacgccggcgcgcgcggcttcctgtcgaaacgctgcagtccggatgaactgatcgccgcggtccgcaccgtggcggcgggcggttgctatctcacgccggatatcgccatgaagctggccgccgggcgccaggatccgctcaccaaacgcgaacgccaggtggcggaaaagctggcgcagggtatggcggtgaaagagatcgccgctgagctcggtctgtcgccgaaaaccgttcacgttcatcgcgccaacctgctggaaaaactgggcgtcagtaacgacgttgagctggcgcgccgcatgttcgatagctggcaatgaacaccgtcgtttcacgattgctgtcggtgatcggctgcgcctttatcttctcagccgcctggttttgcctgtggagtatcagtctgcatctggtggaacgcgcggatttagcggtgctgctgtttccctttggcctgcgtttagggctgatgctgcaatgcccgcgcggctactggccggtgctgctgggagcagagtggctgcttatcttttggctggcgcaagaagtggcgctggcgcaccttataatattgatgaccggaagtctgctgaccctgctgccggtggcattgatttcacgctatcgccatcagcgagactggctaacgctgttgcgacagggcggggcgctgatcgccgcctcgctgctgcaatcgctgccgtggttggcgcaagaagggagcgagggactgaccgccctgctgttaacgctgaccggtggcctgacgctggcgccgacctgtctggttatctggcactatcttaccagtactgtctggcggccgctgggaccgtcgctggtgtcgcagccagttaactggcgcggccggcatctgatctggtacctgctgctctttaccgtcagcctgtggctacagctcgggttgcccgccgaactctcccgctttacccctttttgtctggcgctgccgattatcgctctcgcctggcactacggctggcagggggcgctgatcgccaccctgatgaacgccattgcgctgattgccagccagacctggcacgatcacccggttgatttattgctttcactgctggcccagagcctgaccgggctgctgctgggagcagggatccagcgattgcgcgagcttaacctgtcgctacagaacgagctggcgcgtaatcggcggctggcggaacgcctgctggaaacggaagagagcgtgcggcgtgacgttgcgcgcgagctccacgatgatattggccagactatcacggcaattcgcacccaggcggggatcgtgcagcgtctggcgccaaacaacgccagcgtacgacagagcggccagttgatagaacagctgtcgctgggggtttacgactctgtgcgaagactgcttggtcgtctgcgtccgcgccagcttgacgatctgccgcttgaacaggcgatacgttcgttgatgcgcgaaatggaactggaagaccgcggtatcgtcagtcatctcgaatggcggattaacgaggcggggctgagcgaaaaccagcgcgtgacgctgtttcgcgtttgccaggagggactgaataatatcgtcaagcacgccagcgccagcgccgtcaccctccagggctggcagcaggatggacgattgatgctggtgctggaagatgacggctgcggcctgccgccgggctcgaatctgcaggggttcggcctgaccggcatgcgcgaacgcgtgaccgcgctgggcggtacgttaactatctcttgcacacatggtacccgcgtgtgcgtcaatttaccgctgcgttacgcctgagaggagcgccgatgtttgcctttttaaaagcgccgccggacgccgcgccaattaacgacaaacgcgagctggacgagcgttatcgttactggcgtcggcatattctgctcactatctggcttggttacgcgctgttttatttcacccgcaaaagctttaatgccgcggtgcctgaaattcttgccagcaatgtgctgactcgtagcgatattggcctgctggccacgctgttctatatcacctacgggctgtcgaaatttttctccggtatcgtcagtgaccgctccgacgcccgctattttatggggctggggcttatcgctaccggggtggttaatattctgttcggtttttctacctcgttgtgggctttcgcgctgctgtgggcgttgaatgccttcttccagggctggggctcgccggtctgcgcccgactgctgacggcctggtattcgcgaaccgagcgcggcggctggtgggcgctatggaataccgcgcataacgtcggcggcgcgctgatcccaatggtcgtgggcgcggcggcgctgcattacggctggcgaatggggatgacgattgccggctgtctggcgatccttgctggactgtatctgtgctggcggctgcgcgatcgcccgcaggcggtggggttacccgccgtgggcgactggcgtcacgatgcgctggaaatcgcccagcagcaggaaggcgcagggctgacgcgcaaagagatcctgacccgctacgtgctggccaatccctatatctggctgctgtcgttgtgctatgtgctggtgtacgtggtgcgggcggcgattaacgactggggcaatctgtatatgtcggagacgcttggcgtcgatctggtgaccgctaacacggcggtgaccatgtttgagctgggcggttttatcggtgcgctggtggcgggatggggctcggataagctgtttaacggcaatcgcgggccgatgaatctgattttcaccgccggaattttgctgtcggttggcgggttgtggctgatgccgtttgccagctatgtcatgcaggcggcctgcttcttcaccaccgggttcttcgttttcggcccgcagatgctgatcggcatggcggcggcggaatgttcgcataaagaagccgccggggcggcaaccgggtttgtcggcctgttcgcttatcttggcgcctcgctttccggctggccgctggcgcaggtgatggatatctggcactggaccggattcttcgtggtgattgcgattgccgccggcatttccgcgctgctgctgctgccgtttttaaacgcgcaggcgccgcgtaccgccagcgaagcgtgatgtagctcaccctttcaccgcgaacggggcaaaactaagaaattttcccggttttacctggacgccgtctcaggccagacggcgcgctggtttttacaatgcctggttattacgcaggcataaaaaatcagctcaggagatacccatgctggcctttctgaatcaggtgcgcaagccgaccctggatctgccgctcgatgtgcggcgcaaaatgtggttcaaacctttcatgcagtcctatctggtggtcttcatcggctacctgaccatgtacctgattcgcaagaactttaacatcgcgcagaatgacatgatctccacctacgggttgagcatgacgcaactggggatgattggcctgggcttctccatcacctacggcgtgggcaagacgctcgtctcttattatgccgacggtaaaaataccaagcagttcctgccgtttatgctgatcctctccgccatctgtatgctgggctttagcgccagcatgggggcgggttcaaccagcctgttcctgatgatcgccttctatgcgctgagcggtttcttccagagcaccggcggctcgtgcagctattccaccatcaccaagtggacgcccagacgcaaacgcggcaccttcctcggcttctggaatatctcccacaacctcggcggcgcgggcgccgcgggcgtggcgctgtttggcgccaactatctgttcgacggccacgtgatcggcatgtttatcttcccgtcgattattgcgctgatcgtcggctttattggcctgcgctacggtagcgactctccggaatcctacggcctcggcacggcggaagagctgtttggcgaagcgatcagcgaagaggacaaagagaccgaagaaaatgcgatgaccaagtggcagatctttgtagagtacgtgctgaaaaacaaagtgatctggctgctgtgcttctccaacatcttcctctacgtggtgcgtatcggtatcgatcagtggtccaccgtgtatgccttccaggagctgaagctgtctaaagaggtggcgattcagggctttaccctgtttgaagtcggcgcgctggttggcacgctactgtggggctggttgtcggatctggccaacggccgccgcgcgctggtggcctgcgtcgcgctggcgctgattatcgccaccctcggggtttaccaacatgccagcaaccagtacgtctatctggcctcgttgtttgcgctgggcttcctggtgtttggtccgcagctgttaattggcgtcgccgccgtcggctttgtgccgaaaaaagcgatcggcgccgccgatggaatcaagggcaccttcgcctatctgatcggtgatagcttcgccaaactgggtctcgggatgatcgccgacggcacgccggtattcggcctgaccggctgggccggcacctttgcggcgctggacgccgccgccatcggctgtatctgcctgatggccatcgtggctatcttcgaagagcgtaaaattcgccgcgagaaaaagaatcgagttttgcagactgcctgattcaccaggtatttggtaaccttgcccggccattgcgccgggcttttttattgttcttgctggctggattgcaggagtagctcccgcagccactgctgcgccgggtcatgatggttacgctcgtgccaggccatgcttttggtgaaacccgggatcgccagcggcggagcagcgattttcatgccgctggccattttcgccagcctgcgtggtactacggcaatcatttcactcaccgccagcacttccggcaacaccagaaaactgctgaccgacaatcccactcgccgggtccgaccaagcgccgccagtgcgtcgtcggtcacgccgcgaaagctatcgccctgccatgaaaccagaacatgttccagcgcacagaaacggtctagcgttagcggctggttggcctgtggatggtcttcgcgcagcagacagacatactcttcctgatacagcgcccggctgtgcagttccggcggcgtatcgttgggcgttaacaacgcaatatccacttcgccgcgttcggtctgtgccagcagcgtggccggagattcgggaataatgcgcacgcggatacccggcgccattggcttcagcgcggcgataaatggcacgatcaccgctttcaacgcataatccgtcgcggcgatggtccaggtgaaatcagcctccagcggatcgaaaacgaccggttgtagcagggtttcagcatcggtcagcagttgctttaccggagccgccagcgcctgggcgcgcagcgtcggcaccatgccgtgcggggcgcggataaacagcgggtcattaaaggcgtcgcgcaggcgagtgagcatgccgctgaccgccggctgggtgagtgccagccgcgctgccgcccgggtgacgctgcgctcatcgagcaacgcatccagggctttcagcaggttgagatcgaggtttctgatatcagatttcatgatagccatccgcaaacgcgataagtcacattatggtacgtccggcagtcgacagcaggcaaattcccattatgatagtgaggccgcgattggatgagaggatgcatgatctggataggactggccaccctggtagtggtgtttgttgtgggatttcgggtgcttacctctgattcacgccgcgcgatccgccgcctgagcgaacgccttggcattacgcccgtcccgctggaatcgatgatcgatcagctgggaaaagccgccggtaatgagtatttgcgttaccttgaacggccgaatgaagcgcatctgcagaatgccgcgcaggtgctgctgatctggcaggttgcgattgtcgacgccagcgaaaaaaacctgcattactggtatcgcctgatgcaaaaagcgcgtttagcggcgccgattaccgacgcgcaaatccgtctggcgcaaggatttctgcgcgagctggacccggatgtgagcgatttgcataacctacagcagcgctataacgatctgtttctcccggaagacggcgtgcactggttgcactgatatcacggctgcttatgaacattatcaaggatgatgattcgatttatatcactctccggcgcatgattaacctcgttaaaacaatcgttcacgaggttaatcatgaaacagtctctacagcaaagcgcaatcgtctggccggaagagtatctgccgggcaccaccgacaattttgcctccaatgaaattatcgtcagcggcctgacggcagctcagatttgggcgcagctcgatgacactacgctgtggccgggctattacagtaacgttgccgatatccatttccatgacggcagcggcccgaccctcagcgccaacgcccgattcagcttcagcaccttcggcttcccgattgaggcgcagattaccgaatatgttcctcccgttgccggacaggcggcgcgcgtagcctggcacggttgggcggaggggatgcaacaacgcgtcttgatgtgatccacgcgtggctgtttgaagatttgcccggcggacgcgtgcgcatcctcacccaggagtcgcaaaagggcgttccggcgcaggaactggcgcgtacgttgcccaatccgatgattaacggtcaccaggaatggatttgcgggctggtgaaatcggctcgcggcgagtaaatccgagtgccggatggcggctgcgccttatccggcctacggtttacgaactcgtcccttgtaggccggataagcgtaagcgccatccggcagaatgacgaaggctatattctcaggctatccctttgtatcatgccgtgaaaagtgagaagagttgcgaaaacgttaagtacgtcacatacaaaatgttacactgcgcagctttccgccactttcttcgcaggtcactcatgagtcattcaaatgaaaccaaaccccatgcacgcgatctcgcgcggccaaactggtcggcggtcttcgcggttgctttctgcgtcgcctgcctgattaccgtcgagtttttgccggtcagcctgttaacgccgatggcgctggatttaggcatctccgaagggatggccgggcagtcggtgacgacgacggcattcgtcgcgatgttttccagcctgtttatcaccacggttatcggcaaaaccgatcgccgctacgtggttatcctgttttcgctgctgctgaccctttcttgcctgctggtctcgtttgccaatagttttaccctgctgctgttggggcgcgcctgtctgggtctggcgctcggcggtttctgggcgatgtcggcatcgctgaccatgcgtctggtaccgatgcgcgtggtaccgaaagcgctatcgattatcttcggcgcggtatcaatcgcgctggtgatcgccgccccgttgggcagtttccttggcgggcttatcggctggcgcaacgtctttaacggcgcggcggtaatgggcgtgctgtgtacgctctgggtgctgaaagcgctgccgtcgctgccgggtgaatcggcggctcagcagcaaaatatgtttggtctgctgaagcgtccggggtgatggccgggatgtgcgccattttcatggcctttgccggacagttcgccttctttacctatattcgtcctgtatacatgacgctcgccggttttgacgtcgacggcctgacgctggtgctgctgagctttggtatcgccagctttatcggcacctcgctctcctcggtggtgctgaagcgctcggttaaagcggcgctggcgatttcaccgctggtgctgaccgcctgcgcggtggcgctggtactgtggggagaaagcaaaatcgtcgcctcgacggtggcgattatctggggcttcgcgtttgcgctgatcccggtggggtggtcaacgtggatcacccgttctctctccgatcaggcggaaaaagccgggtcgattcaggttgcggtgatccagcttgccaacacctgcggcgccgcggtcggcggcattgcgctcgaccacttggggctgctgtcgccgctggtgttgtcaggaatattaatgctgtttaccggcctgctggtgacgaccaaagtgaagatgaattaacccgcttacggccgttcgccttttgccagccgggcattgatgtcgtcaatcacttccggcaggtccgccagggtatcaaccacatagtgagccccggcggcatacagtttgcctgccgcccgctcgcgacgggtggcgatttcctctttcgacatcgcctggtactcctcccaggtagcgccgaattcgttaccggacaccgccagcccgatgctccacatcccggcatgtagcccttcgctgatgcccggtgcggcgtcgtcgaccttcacgcagtgggccacatcgtctatgcccagggtaatcacgttctgcagcgccatccacgggcccggacgaccgccgacggcaagatcatcggtggcgacccagtggtccggggcgtagccctgagcggcggcggccggtaccagcttttccatcaccgggcgtggataacccgagcaggagccgatcttcaggccctcggcgcgcagcgcagcgatggtgtcgacaacgccggctatcggtgtggaaaaatcgacaaccttagcgatttgcagcggcataaacgcggcgtagatcgcatcgatatcggcggcagtcatcgcgcggccgaatttggcctgccagcggctatcgacagaagggagtttgcccagcgcctcaatgtgctgccatttgccaagccccatcggcacgcgggcctcttcaggagtgatctcaatatcgaaggcctggcggaaggcctcgacgaaaatttgcgtcggggcgaaagagccgaagtctacggtggtgcctgcccagtcaaggatcagtgcgctaatacggttcatggcggttccttattgtttccaatacatggcgttgtcgatagccgccagcagggcggtgatatcggcgtcgtagacttcgccaatgttgccgatacggaagcagtcgctttgcgatactttgcccggatagataacgaagccctgatctttcagcttctggtaaaaggtgtgaaagcggtactgcggcgcatccggtgaataaaaggcggtaatgatcggcgagtgcaggttatcgtcgagcagcggctggaagccgagcgcgcgcatccctgccaccagacggcgttgattgttgcggtagcgctgatagcgggcgctaacgccgccctcctgcgccagctctttcagcgcctgggcaaaggccagcacggtatgcgtcggcgaggtgaagcgccacttaccgtggttatcttccatgcagcgccattgggcatacagatccagggacagcgagcgcgaacggcctttgcaggcagccagctccgcttcgcgggcaatcacgaaggcaaagcccggcacgccctgaatgcatttgttggcggagcttatcaggtaatcaatattcagcccggcgatatccaacggaatgccgccaaagctgctcatcgcatcgacgatatagcgtttatcgtaccgtttcgccagctcggccacctcttcgatcggattcagcatgccggtggtggtttcgctatgtaccatcgcgatatgggtgatcgccgggtcgttctgcaggatctgttcgatcgccgccgcgtcaggacgggagacttcgccgcagtcgtaagggtggcaggcgatacccatcagttgcgccatttcaatcatacgcgcgccataggcgccattgctgacgatcagcactttgccttgttcgccgatgacgctgccgagtaccgcttcgaccgcgtagctgccgctaccctgtagcagcaccgccgtgtaaccgtcggtcggggtagccaactgcaccagctgctggcgaatggtctgtaccacgccgagattgtaatcatcatcccaagtacagctatcgaacaacatcgcctcttttaccgtacgggaggtggttagcgggccgggggtcagcagcaggtagttccgtgaagtcatttgtctcaccatttggtctataccagatttatatttatcatggagacaaagccggggcagggtcaaaggaaatgtggcgctgcaacaaaaaattcatctggctatgtataatgagcgcacgaaaagtggcagtgagtaaacatgaaatcaccctctggcgagatgccgcaatacctgatgattaaggcgcagctgcaggcgcgtattcaaaacggcgcgttgaaaagcggcgataagctgccttcagagcgcgaactgtgcgcgctgttcaacacgacccggattacggtacgcgagagcctggcgcagctggaggccagcggcgtgatttaccgcgccgaccgccgcggctggttcgtgacgccggagcgtctgtggttggatccgacgcagaacaccaacttccataagctgtgtctcgagcaggggcgcgaaccgaaaacggtgctgcttgaagggcgcttaaccgccgtgccgctggacgtgatggccccgctggcgctgcagcccttcgatcaggtttacttgctgacgcgtctgcgctatgccgacggccggccggtgtgctactgcgaaaaccactgtctacccgcgcgggtgcctgagctgctgcgccacgatctcaacggcagtctgaccgagatttatcaaactcagtacgacctgatctataccagtatgcatctgtcgttttatcccacctcaatgccggcgcaggccgcagaggcgttgggggtgatggaagggcgcccggcgctgctgttgcgccggctgaattacgatcagcacgggcgtattctcgattatgatattgaatactggcggcatgacagtctgcggatcgaagtcgatacacattgattttattagttaaattttttgatctccccggtggcgctagcgcttaccggggctacgcatcccccctcgttttaactctttcgacacacttctttcatcgttttgtcataaaccctcggtagcgtgaaggcaaatctggtctacaccagaataactgactatccgatgaggcttaaacgatgaaactctcccgacttgctctgctgtccctgttcgcgctgaccagctctccggtttgggcggacggcgtcgtcacggtttactccgccgatggcctgcatgacggcgataacagctggtatcagagccagttcgctgccttcaccaaagcgacgggcatcaaagtgcagtatgtggaaggcggctccggcgcgatcgtcgaacgtctggcgaaggagcgcaccaatccacaggctgacgtgttggtcacggtgccgccgtttatccagcgtgccgcgaaagagcaattgctggcaacctttaccccgcaaggtagcgcacagatccccggcgctaacgaccgctacgcgccgctggtgaacaactatctgaccttcatctataacgggcagttgctgaaaagcgcgccggccagctggcaggatctgctggatagccgctttaagaacaagttgcagtactccacgccgggtcaggcgggcgacggtaccgcggtgatgctgcaggcgttccacagcctcggcggtaaagacgccggttttgcgtatctgggtaagctacaggccaataatgtcggcccatcggcctcgaccggcaagctgacggcgctggtcaacaaaggcgagctgtacgtcgccaatggcgatctgcagatgaacctgtcgcagatggcgcgtaacccgaacgttaaaattttctggccggcggatgacaaaggcgagcgcagcgcgctggcgctgccctacaccatcgggctggtacagaacggaccgaacagcgaaaacggcaaaaagctgatcaatttcctgctggataaaccagcgcaatccaacgtcagcgagctctcctggggcctgccggtacgcagtgatgtggcgccggatgacgctaactttaaggcggcgaaagcggcgctcgacggcgtaaagagctgggaacctaactgggatgatgtcgcggtatcgctgtcggctgacattgcccgctggcaccaagtgaccgatagcgagtaagcctgatgttgatgaaaaccaccgtcacttcttccccgtcgctggcggggacttccgggatcaccctggactcgctgcgcgtttcataccacggcaacgtggtcttaaaaccgctgtcattgaccattgaacccggtgaggtgctggcgttgataggcccttccggttccgggaaaaccacggtgctgcgggcgatcgccggttttgtgcaaccggctggcggtcggatcctgattggcgacacggacgtcacccagctgccgccgtatcaacgcgggctggcgatggtggtgcagaactacgcgctgttcccgcatatgaaggtggaagataacgttgctttcggcctgcgggcgcaaaagcagcccagggagcttatcgccgagcgggtgactgaagctttaaaaattgttggtatggcggattacgccacccgctatccgcatcagctttctggcggccagcagcagcgcgtcgcgatagcccgcgcgattgccgtgcgtcctcgggtactgttgcttgatgaaccgctgtcggcgctggatgcgcaaattcgtcataacatggtggaagagattgcccgtctgcatcgcgaactgccggaactgaccattctctacgtcacccacgatcagaccgaagcgctgaccctggcggataaaatcggcatcatgaaagacggttcgctgatcgcccacggcgaaacgcacgagctctatcactatccgccgaaccgctttagcgccgaattcctcggccgcgccaatatcctgcaggcgacggcgctgaaagacagcaccgagccggggctggttagcgtgagctgcggcggcggccttattaacgccttcagccggggcggcctgcatggcaacaacaagctgttatgcattcgcccgcagcacatgagcctggcgccgcgatcggcaaccagtaatcgtctcaacgccaccctgacctcggtacactggcagggcgatctgacgcatctgctgtgtgacgtcgcgggcgaagcggtgcggatcgtcatgacccacgtaaacccactaccgcgtgcgggggacaagctggcgctctacttcgaacctggcgatgcggttctgatcgaggtgcaatgatggcgcaaaccctaacgcttgcgcgtccggcgcgaaacttacggccttacctgtggctggcattgccgctgctggtgctggcgacgctatttttctatccgctactgttgatcgctgaacaggcattacgtgacgccagcggcaacctgagcctcgagactttctggcaggtgattgactcaaaacgctttattggcgcgctgctcaataccttacagattgcggtgttcgccacccttggctgcctggtgctcggcagcgtgctggcgctgattctggtatttattccgttccccggcagccaactggtgagccgggtcattgatacttttattgcgctgccgacctttcttatcactcttgcgttcacctttatttacggctcggcggggctgctcaacggcaccctgatggcattgtttgcttttgaactgccgccggtagactttctctattcgattaacggcgtgattctggcggagattaccgtctttacgccgctggtgatgcgcccgttgatggccggactgcggcagatagataagagccaactggaagcggcgagtattctcggcgcccatccgctacgggtgattacccaggttatcttcccggcggtgctaccggcgctgatggcgggcggcagtctgtgcctgctgttgacgaccaacgagttcgggatcgtgctgtttattggcgccaaaggggttaataccctgccgatgatggtctacagcaaggcgattctggagtcggattacagcgtggcctgcatgattgcgctgattaatattctgctgtcgctggggctgtttatgctctatcggctggctgcggcgcgcactggcgtaaggagttaacgatgttgatttggtcgcgtaaaggccgcgcggcggcgggcgcgctggcggtgacgctttttgccggcgttttcctgctgccgctggcggtgattttactctccagcctgagtaaacaatggaatggcctgctgcccaccggctttacctttacccactttgttaacgcctttcgcggcgcggcgtgggattcgctgttttcgagcctgatggtgggtttctgcgccagcctgttggcgctgctgtgtgggatgtgggcggcgctggcgctgcgccagtatggcgcgacgctacagaaatatcttggcctggcattttatctgcccagcgccatcccctcggtttcggtagggctgggcattctggtggcgtttagccaggggccgctgcagatgaacggcaccttctttatcgtcctggcggcgcacttcgtgctgatctccgcctttaccttcagtaacgtaacgaccggactggcgcggatttccgccgatattgaaaacgtcgcctccagtcttggcgcctcgccgtggtatcgcctgcgtcatgtgacgctgccgctgatgacgccgtggatgatttcagcgctggcgctgagcctatcgctgtcgatgggagagttaggggcaacggtgatgatctatccgccgggctggacgacgctgccggtgaccattttcagcctcaccgatcgcggcaatatcgccgatggctcggcgctgaccattgtgctggtgggcgtcacgctgctgttgatgatgaagcttgagcgcatcgcccgccgattaagccagagatagattgtgtccggagttgtagcccggctcagcgtagccgctagccgggaatcggattgcctcagaaccaggcctcaaacataccgccgacgttcagcgaatccagccgctcgtcgcttgtgtcgttgaccttcgcggtgtgctcgttatccacctgaccgccggtaacatagaagcgcagcatcgggcggaactccggtcccatgccgatggcgatgttctgcgacagcgtcagcttccagccgtggttatccccgccctggtcgtagtcaacgcgctggtagcccgcttccagccaggtcgagtgcacgtcgttccagaagtacattggccggacgatcgcgccgtagtttttacggttgcccgtattatccttgccgttgtcgtagtcgtggaaggccagcagatactcgatctgcgcctgttgggtgaacttatgactgccctcgaagctggcgtagaccgtggtcaggtcgtcggttttgttgtagacgctgttatccgagttgtcggagtagcgcaggatcaccttattcaccccgctgtcgttggtgtggctcagcaccagcccgccctgccaggcatcgaggcgcgcgtcgctgtccaccgcttttgagtcaaagccgtagttggcgtatacctcgacgtcgatcggtccggctttgatgttgtgggttttggtagtcaacgcgtagtggccgttgtcgccggtatcggagctgccagtacaggtgatgcgcgacgggttggtttcgtcggccatcacttccgggctacaggatttcacctgcgacaccgccgccacgtcgaactgcacaccgccaatatcgaagttcttcaccccggcgccctggccgtcgtggttcatccagaagtagtcgttgatcccctgttgcgggcgctggtggaagtcgcggccggcccagatataggcgttggggttagactcgaggacgttggtgacgccgacgtaggcttttttcaggttaacctcgtcgctccagtggtcaaacatgacgttgagatcccagatggccccctgcgcgcttttgaaggctttcgttatctggaattcgccgccattgctttcgttgccgagacggccgatcgccgaggcgccgttataggagccgtcgacgccgacatatttctggtcgccggtctggaagtgggcgccatagcgggcgtaaccgctaaatttcaggccgaaggggatcgccagatccggcgaggcggcggtggtttccgggttagtaatcacgtcgacctttttgttggcggcggcgtcgattttcgcctggcggtcggccagcgctttatcaaccgctttcgcgacgatggcgtcgatttgctcctgggtaaactcctgcgccagtacggaaattgggcacagcgcggcgataaccgccatagccaatggcagctttttaactgtattcatggttatctcactttaataattaatatatgcagacaataaccgccccattctggttaaaataaaaataaccaaaataagctgatttgttttttcagggtacagctacgccggagaataagtgttcttattctcagtggcgaaagttaacgactaataccaacatagatgagttaatttatttgaataaagtaggtcatgatatttcctgaggttattgagtttataatcaggtcatttggcgaaaatcccttttccgcataaattcatattttcaggtaagacaataattactggctaacggctccggcgacaggtgcgacgctttttgccttttcgacttcattctttattaatgaacgctcataggcgcgcaggaatggcagataaatcaccgccgacatcaccatgcagataacgcacatcaccaccgggcttaaagtccagttagccgcccacgaggcgccaatcggcgcgggcgtcgtccacggcgtcagcgaaaccacctggctcagccagccaaggcgggttgcgccgtaagccagcactgcgttgaccatcggcacgcagacgaaggggataaacatcattgggttcatgatgatcggcgcgccgaacagaatcggttcgttgatattaaagaagctcggcacgatgcccattttaccaatagtccgcagatgcgtgacccggctacgcagcagcaggaaggccagcggcagggtcgaaccgacgccgccaatcagcaaatagtgatcccagaagccctgcaggtaaacgtgcggcagcgccgcgccggccgccagtgccgcctggtttgccgacaggttagccatccagaacgggttcataatcccggtaacgataagcgagccgtgaataccggcgaaccagaaaatctggcacatcagcaccgacagcagaatcgccggcagcgaatcggaggcggagaccagcggttccagcagatgcataatcgcctgcggcaggatcatgccggtttgcgcctcaatgaacaggttgagcggatgcagagtaccgatgaccaccagtaccggaatgaggatctcaaacgaacgggcgacgccggtcggcacctctttcggcagacgaatggtcacgttattttgcttcagccaggcgtaaacgcgggtggagtagatggcggtgatcagcgcggtgaaaatgccctggccggataaatattgagtagaaattttgccatcggcatagggcgcggcgaccagcaggaaggccataaacgccagcaggccggacatgacaggatcgagctggaactggcgtccgaggctggcgccgatgccgaccgagataaagaaggtcatgacgcccatgctgaggttaaacggcagcatcagctgttcacggtactgctgggaaaaatccagccagccgcgggcaaaaccgttagtggtctccggcgagaaaggcggaaagataaataccagcatgaaagagccgatgatcatgaacggcaatgcggcggtaaagccatcgcggatggcgataacatatttctgttgcccaaggcgtcctgccagcggagtaatagactgctcgatcacggcaatcatcgactgatacagagaactcatttgaacacctcttagtgcgccgcggcgatcagcgacagggcataattcagaacgttatctccccgctgcattccgtaatccatcgtatcgataggctggacgggaatattcaggggagcggctttctcgctaagcattttcagcatgtatttgacctgggggccaagcagcaccacctggtattgcggaaactgcatatcaaattcggcaacgccataggcgtcaatctgcaccggcaggtcgcgttcctttgcggcatccaccattttcctcaccagcaggctggtggacatcccggcggagcagcacagcataatcttgtacatcgacggctttcctcatatgtaaaaagttattgcgaggatgatttgatatcagacggaaaccggtttccatttataaaaaacagaactgtgagcgcggtcaataactcaccgttagcggccttactaattagattccgctcacaaaataatgtcgatttggcgttgttttttgccgaaatggaaaatcggtttccaaataaaaaaggaaacggctatactgccgctggttataattgaagcgattcaggacacagcgttacaggggcctggccgcgcctgccaggggaaaaaagatgtcgacaatcaatgatgtatcacggttagccggggtatcgaaagccacggtttcgcgcgtgctgagcggttcgcgcggggtaaaagaggccagccgccaggcggtgcttcaggcggcggaaacgctgaactaccggcctaatatgattgcccaatccttactgagccagtcgacgggctgtattggcgtgatttgcgcgcaggacaacatcaatcagactaccagctatctctacgctctggaaaaacagctcagccagcatcagaagcatctactgctgcgcttcgccaataaccgcggcgacgtattaagcgcgctggatgaactcacctgtggcctgtgcgatgacgtgctgatcatcggcgcgcgctttccgctgcagatcgagcgccccgatgtggtgctgattgattgtctggaaagcgatggcgagaacagtattcagtttgatcacgcctttgccgcggaaaccgcctgtcattatttgattaatcaggggcggcggcagattgcgctgatccatccgcaggggagcggctttgccgaccaggtgctgctgggctataagcatgcgctggagaagaacttcctgccgtttaatcgtaacctggtcttcctggactgcgcctcgtcgtcggtggcggtgcaggagctgatgaataacgccactaccctgaattttaatgcgctgttggtgagcgatgaactgcaggcgcagcgggtagtgtcgcagttgcaggcgtttaaccgcgcggtgccggaaaaggtgatggtcttcagtctcgcgggttcgctgcaaatgccgggtattccgaccatcccggcgattgagtattcgatggatgcgatggcttcgcggatcgtcaactggctgatcgggaaaagcccgcagcccggcggcagcctgctgcgcggcgacttaattattccctagcgttggggagattacgggtcgtgcatttagcgcgtgagtttgattaactggcgccacgcgcggttatgcagcgtgaacaacagcatcttataaaaggcggtggaatggatacagacgccgctgagcagcaacataatgacgcccaccagtgccgctgttagattaactcccgggtaagaggcgtcactcagtgcgtaaagcaggtagacaaccgttaataccagactgatcgccgctaacataatatgcactcgcacggcgcgcatgctgcctttgccgatcataaacatcgtgatgccgttgataccagcgatcagcaacgaaatcagcactacccacacaaacacgcttgcggcaggctgatggagtacgctcaggatgaggtagcctaaccacaactgcggaatagcaagactgatagttattccgagcgtgctaaatgctgcagggatccccatagtatggattcccacaggcgcccccatttctgcggcaagctgtgctttcaactgttgcaactgcatagtgctggctttgctcatgctgagcgccacgtcgtgacagtgctgcaggcggtgggaaaattttttaaacatatgagtatcctgcatttagctggggagaacgattgcaacagccccaccacatagcgtccagactggattgtgttctgtgggttacgaatggtccctgtcagcgaactgccaacaaaggccgacgcattggtaaatgcacccattaattcacgttgcagtgatttttgtagtgcttcgctcgggaagcgtttcgggtaaaccccggcgcggatcgcggctttcacgccagaattggaaatgccagggttctatgctctgattattgcttcagtaatgcgtttccgctcagcgcgattcagactatggaaccactcaataactttacttgaggatgccgccttcatcagcttgtaagtttctacagtgcttctcagtgcagttccagctgcagccagcgaaatcacatctagtactgttgtggtggctacgtaccattcctggctgtccagccaggcaacatctgagccgtgctcgttgtgtagagctagtagtcttccggcaccaatcatacattgcgcgccagtagccaacgtgccggacaagcttattgcggcgatcaccccagaacctcctgcagtaaaaggtactgctgcaccagctccaaacgccataatcagcgtaacgagcatagcaccacaggcgaagccggtagaggtaatttcagttgccagtgatggggttgctagcgtagatactatggcttcttctgctacgggttgttttaattcgggtactttgcttattaccacatgactaacggtactttgattagcgttggcaatacggcgcgaagggcgcactagccagcgctgcttaccatcatcgaaaataataccgacgtggtaaaaattacgggtacagtcgagtttctctgccagttttttaaaatcgatatcagctccggtctgtaggccaaggctgcgagagaaagaataatttggcagagtgctgtcaggtgacagcagaccggggaagttcattagtaggctccttcattccttgaggataaatggtacttttcacctaatgccatagtaataaaaaatagtagagcggcttattgggaaataaaaatattcatctaattgtgatttgctacagcgtctttatttgcttcgcgccaacgcagggtggcatgttttttcagctcagcttcaagcgctgcggctaatgtagcgctcatatttataccggcttcgcacgcacgatcgagtaaaccccgttcgagggcgacggtcactttttgagttttacgttttacagtcatggttaaatctccaatgaaccgatatgtggagcatacgcctatactgattcataaggaatacggcgagggtaacgccctcgagggacgtaaagcctgagtccggcgaagtaccgaactcaggtcaggataatttggagtggcaacggttttcctgataattcagcccgttatttacccgggcagcgaattttatcaatggcggccagatagcctttttgattattgcgctctttcgccagcgtcgcttcgcgaacgtaactctggttgtctttcgaggcgaggattttattggcgaaatcggtatcgctgagggtgctcgccggggcgcatttttccttcaccgctttcaacacctgctgtttttgctgctcaaactgcaggctttgcagcggcgattcggcccacgccgcgctggcgctaagggcagtaaccagacacaacatccaacacgctttcatggcgtttctccttcacttttcgcttcagtcaactatatgcgcagcaggtgaattgcgcaaatgttagacactttttgttgtttaaaatcagacgattgctattacgccgcgcgtacccgccgccgggaatccaccgcgataagaatgaccgaagagagaatcaacagcgtccccagccagtccggcagagtaaaggtaatgcccaacagcaatagagagagcagggcgctgctcagcggctctgcgcagctgaggatcccggcctttgcgccgccaatctgctgggcgccgttgagatacaggctgaaggtcagcgaggtaccgatcaccacgagatagaaaaacgccagcagcagacggccgttcaccacaaagttcgcgctctggctgccataaaacggcaacagcatcgccccgccaatcagcatgctccagccgacgatcggcagcgtgccgtagcgcgcgataagcgttgagggataagtagtataaaacgccgccgcgaaggctgaggcgatcccccagaacagcgccgccggcgagatggagagcgaggtcgggttgccgtgggtgaccagcaggaaggtgccggcaagcgaggtgccaatcgccagcagcacaaagggactgggccgcgccttacgcgccagcgcgaaccaggcgacgataatcgtcggcgacaaaaactgtagcaccgtggcggtggcggcgttcgacttctcgatagtcatcaggaaggtgtactgtacggttaacgcgccgaccagcgagaaaaacagcaggctaagggcatctttacggttttgcatgacgcggaaaattttgtcgccgtgaacgaaggcgagcatcagcaaaatcagcccggcgaacagcaggcggatcatggtcagatagggcgatgacatctgactttgctgcataatgtactgcgcgcagaccccggaactgccccacaggacggcggcgatcaatacgttcaacatccctcttttgctggaacccatttttccctcgcgtgaaatagcgcaaagcaggaatcatagcacggcgcaacgcggcgcgcgctttactgccgacgccactcgcctggcgtcatgccgtagtgttttttaaaggttttcgcaaacgaagcctgtgattgaaaaccgcagcgttcggcaatcacttccagccgcgcctggcgatcgagatgcagcaggcgagcggccatcgccatccgcagttgcgacagccacgcctgcggcgtcagatgatagacgcgggcaaaatggcgggcgaaggtggcgcgcgataaaaacgcccgcgccgccatgctctcgatagtccacggttgttccggcgcggccagcaccgcgagaacggccggcatcagccgcgcatcgctcatcaggcgcaacaggccgcccggcggctcctgcgcgccgagcagggtacgtaacagcagtaccagcagcgtatcgccaaggctgcgcacgatagcgctaccgccgggatgttccgccaggctttcgcgtaccagcacgttaagcaaaatatccagttccgggcaatcttcgcgttcatcggtatgtaaatggatcagcgccgactcttcggcgaacagccagttgacgtgcgggccgaagtaaaactcgccgcacagcatctccagcgcgtcgctttccacggcggtacgcacttccgttagcgtgccgttaaagcgatgggcgacgggcagtacctggccccactccaccaggctctccatcagatgcggcgaaccgtgcggcagcaggatcacgtcgccggcgcgcatgtggcgggtttgatgaccaacggttaaccgtccttcgccgcgcaacacaaagtgccacggcaccacgcccgctcgcatttgatcgtgtccggcctgccagcggccgccgaaacggcaatgcagattcacttcgcaacgcggggccagcagcgtcaacagatggctcaaactatccatgcgactcctgagacgataagacaaaaaaatgagacgaagagcgccagtctagcacgtcgccgaccactaagatgtctccattgccacaacataccctcaaataacaggagtacaccatgagccgtttagccgatatccgtgaacaagatgccaccggtaaagccgccgatattttcgccggaattaaaaaagcgatgggtaaagtgccgaatgcctatctgaccatcggcggccactcgccggcggcgctccagcaggcgctggcgcacaacgcgatgctgcataaaagcagccttagcgcgcaggagctggaagcgattaatttatcggtcagcgaagcgaccggctgtgattactgcctggccgcccataccctgatggccaaaaaagcgggcttcagcggcgagcaaatccacgccctgcgccgcggcgagtatacggaaggtgcgcgcctggatgcgctggtgaaattcgcccaaaccctggtgaccaccaccggtacgctgccggaagtggatgtcgccgcgctgcgtcacgccggttttagcgaccagcaggtgattgagatcatcagcgccgtcagcgccatcctgttcaccaacatggtgaaccgggttaacgacacggtagtggacttcccgaaagccgattaacccgtcgtcgagcgcctgtttacagtcccaattcgcttagcccggatgatcgtcagggcggcgaccctgagaccagtggaacaggcgctcgctttccgcgatcggcaaatcgttgatgcaggcgtagcgcgtggacattagcccgtgctcatcaaactgccagttttcattgccgtatgaacgaaaccagttgccgctgtcgtcgcaccactcgtaggcgaagcgtacggcgatgcgattatcctgccacgcccaaagctccttaatcagccggtattgcagctctttacgccattttcgctgcagaaactccacgatttgcccccgtccgtggacaaattcgctgcggttgcgccattcgctatccacggtataagccagcgcgactttttgcgcatcgcggctgttccagccatcttcggcggcgcgcaccttctgcgcggcgctgtcgcgggtaaacggcggtagcgggggacgttgttcactcatcaaaactctccttttagggataattgttgctgcaggcgctgattctcctgctccagttcatgaatacgctcttgcaggctctggctgtattccgcgacctgctgtgcgctgtagcgcggcgtaatgtgctgcgggcagttccagtcaaaagcctgcagatgaaaacgaaacaggcgttcgatgcgggcgcgatagtttgccggcgtcactaacgccagcagctcaggctgctcttccgccgccagcacctcgacggtggcgtagattttcagcctggcacggcgcgggtaatccatcaaaaacaggcaggcccggtcgctgccgcgcaggttgccggtggtaatgtactggcgattaccgccgaaatcggccatggccagcgtggtgtcatccagcaggcgcagaaaacccggcgggccgccgcgatgctgaatgtagggccagccgctttgcgacaccgtcgccagataaaaactgtcgcgggtagcgatcatcccctcttcgctagcgccgaagcgatccgcctgacggcggctgtgcggcgtttgccacagctggtcgctgcccatttcatgttgcacatccatgacatccggggtgatagcgatatcgagaaaggttgctgccataacgcctcctgaaggtaggggctatcatggactgtgctgtgaaaaatgataatactgcttatctggcaatcatctttccggataatgggagaataatggaccgattaagcgctatggcgctgctggtgaaagtcactgaactgggcagtatgtcggcggcggcgcgggcgctgaatacgccgttgacgaccgtgagccgtaatatcggcgagctggagagtgcgctgggagtccgtttattgacgcgcactacccgtaaactcaccctcaccgatgccggcgtcgattatgttgccgccgcgcggcggatcctcgaagaggtggaaaacgccgaacgccgggcaacgggtgaataccaggagccgaagggcgagctggtgatctccgcgccgacgatgtttggtcgccagcacgttctgccagtcattagtgaatttatcgcccgttatccgcaaattcgcgtacgtttgttacttagcgatagtaatgccgatctggtcggcgaccatatcgatctggcggtacggattggcgaactggctgatagcagcatggtggcgacccggctgggcgcgatgcgcattgtagcctgcgcccatcccgcgctgttggcgaaatacggcgaaccgcagcggccgcgcgatctggcggcgctgccgatcatccgtattgaatcgccgatgccctatcgcggctggcgctttcgcgccgttgaacgggaagatcagctgattaatctgccgccggtgttggccgtcaccacgccggagagcgccgccgatgccgcccggctgggcgttggggtggcccgcttgctgcactatcaggcgctggatggcctgcgctgcggggaactgcgcctgctgctggaaagcgtcgagccggagcccgcgccggttcatttgttatataccgcgcgggagctggctccgcttaagctgcggaaatttatcgattttgccgcgccggcgctgcgccagtccttgctacgcattgccggggccgcttaatgcgccgcggttttcagcggcgcctccttcaatagccaggaaaggacaaacgcgacggccataatgcaggctgccatcaggaatgccgcatggatcgccgcgccgaaggcgtcgagataatcgagacggatcgccgctggcagatgctgtaccgccaccgggttcatggctggcggtagcaccgcgccctccggcaacagtttctgcaggttattttgtagcacatgggtaaagaccgcgccgaacaatgccacgccgatggagccgccaatcgagcggaacagggtcacgccggaagtggcgacgccgtacatctgcgccggcatcgcgttctgtaccgccagcaccagtacttgcatcaccagccccaggccagcgccgagcacgccggtaaacaggtataactgccacattggcgaatgaatggtgatgcgtgtcagcagaaccatgccggtcacgccgagtagggtaccgataatcgggaaaattcggtatttcccggtgtggctaatcacccggccgctgatgatggaggtcagcaacaggccgcccatcaacgggattaactgtaacccggcctcggttggcgtcgcctctttcaccacctgcagatagagcggcaggaaagtgaccgaaccgaacagcgacatgccgataacaaagccaatcagactacacagcaggaagctgcggttgcggaatagcgacagcggaataatcggttcggcggctatccgttcttcgtagataaagccgatgatccccacgatgccgaaggccagaatgcaccacagctgcggatcattccacgcatggacgctgccgccttcggaggtaaacaggatgatgcacaacagcgccatgctgaggtaaatcgccccagccagtcaatctgatgctggctacgtttgttgctgctgtggaataccgcgccgatgaccagcaacgcgaacagaccaagcggcaggttgatatagaaaatccagcgccacgaggcgtgctgtacaaggaaaccgccgatcagcgggccgataaccgtcgccaggccgaagacgccgccgaacagcccctgatagcgcccgcggttggcaggtgggataacgtcggcgaccgccgccatgctgatcaccatcaggccgccgccgccgagcccctgtagcgcgcgcatcagtaccaattgcgtcatgttctgcgccagcccacagagcgcggaaccggcaagaaacagcacgatcgccacctgcagcacgattttacgcccgaacaggtcgccgaatttaccgtatagcggcactacgatggtcgagctgaggatataggcggtgaccacccacgagagtttatccagcccgccgagctcgccaacgatagttggcaaggcggtggagacaatggtctggtccagcgccgacagcagcatcaccagcagcagggcgctgaacagcaggcggattgagggcgccggttggcttgcgacttcagatgtcattgcatcactcgcttgaaattaattaaatgcataattaatatttagggaaatgatgaatcgggtcaagagatcgccagcatatgccagcacaaaaagctaatgaagcgccgcgccgccccggtcggccacgcggtaaaaaaccgggaaccgctaaccgcgagcagttgatagatatcgccctggcgctgtttgctcgtcacggcgcggcccgcgtgtcgctaaatgccattgccaaagaggccggggtgacgccggcgatgctgaattactattttacgtcgcgggaagcgctgattgagaatttgctggaagagcgttttatgccgctgcgcaacgatatcagccgcatttttgtcgaccatccgcaggatccggtgacggcgttgacgatgatggttgagacgctggcggacatggcggagcaaaatgcctggttcgcgccgctgtggatgcaggagatcatcggcgagatgccgatgctgcgccagcacatggatgcgcgcttcggcgaggagcgttttcaggtgatgctggagacggttcgacgctggcagcaggaggggaaaattaacccggcgctggcgccggagctgctgtttactacggtgattagcctggtgctggtgccattctcgcgcatccatagcgatccgcgcttacaggcggtaaccaggcagaccattgttagccacgcgctggcgttaatgggccacggggtcggcggttaaggcgtgattttgtagcccggataagcgcagcgctatccggggttatcgttacagcgtcttcgataaataatggcgttgcatacccgcgtgcgggaaatcgggcagcgacatctgcaactgatagcctaatttctgataaaacggcagcgcctggaagctgaaggtatcgaccaggagatggctgcagcccaacgcctgcgcctgccgttccgcttcctgcataagctcgcggcccagaccgttgccgcgcgtcgcttcgctcacccacaggtattcgatacacagccagttgcctttgcgtttggcgataagcccgccgcgcatcaccgcttgctcatcgcgggagtaaatgcccagatcgccaaactgatctgcgtcgagatactgctgattatactgccgcaggccggcaaataattcttgttgatcgtcgggattaatgctttttgtaattattagacccattaagtttctccagttgcacaggctatcgttatattttcctctactgactttcacaaaatattcttattttctccactattttttgtcttaattttgtcgttcaaagtaagcgaaataacctttccatgactttcgaaagggcgggctgagaatccccacaataataatgatgttaaggaacatctaagctccattgcgatatttccattgagacgaaaatttcgcagcgcccctcttttcctcgcgattcaattcacgggggacgtcttacatcttgagaaaataaaatgaaacacatcatagcccccattgcgacagcattatttctcctgagcggatgcgataatgcgcagacaactgcgccgcaacaacccacgcccgaggtgggaattgttacgctgcaagcccagccggtgccggttgtcagccaactgactggccgcactaccgcctcgctcagcgccgaagtgcgcccgcaggtcggcggcatcattcagaagcgcctgtttaccgaaggcgatatggtgaaggccgggcaggccctttaccagatcgatccctccagttatcgcgccacctggaacgaagcggcggccgcgttgaagcaggcgcaggcgctggtggtctctgattgccagaaagcccagcgctacgcgtcgttggtcagagataacggcgtctctcgccaggatgccgacgacgctgcctccgcctgcgcccaggacaaggccagtgtggagtcgaaaaaagcggcgctcgagagcgcgcgcatcaacctgaactggaccaccgtcaccgcgccgattgccgggcgcatcggcatttcctcggtcacgccgggagcgctggtctctgccgatcaggataccgcgctggcgacgatccgcggcctcgacaccatgtatgtcgatctgacgcgatccagtgtcgatctcctgcgtttacgcaggcagagcctggccagcaacagcgataccctcagcgtgacgttaacccttgaggatggcagtacctatcccgaaaaagggcgtttggcgctcaccgaagtcgccgtagatgaatccactggctcggtgaccctgcgcgccatcttccccaacccgcagcacgtcctgctgccggggatgtttgtccgcgcgcgtatcgatgaaggcatcatgaacgacgcgatcctcgcgccgcagcagggtatcacccgcgatgccaaaggcgatgccacggcgctggttgtcgatgccgacaacaacgttgagcagcgtaccgtgcaaaccggcgataccttcggcgataaatggctggtgctgagcggtctgaaagcgggcgacaagctgattgtcgaaggcaccggtaaagtgtccccggacaagcggtgaaggccgttgccgtcaaaaataacggaggcaatgcctgatgttctcccgtttcttcgtgcgtcgcccggtctttgcctgggtgatcgctatccttatcatgcttgccggggcgctggcgatccgcacgctgccggtgggacaatatccggacgtcgccccgccggcggtaaaaatatccgctacctataccggagcttccgcagaaaccctggaaaacagcgtcacccaggttatcgagcagcagctcaccgggctggataacttactttatttcacctccaccagcagttcggatggtacggtaagtattaccgtcacctttgagcagggaaccgatccggacaccgctcaggtacaggtacaaaacaaagtacagcaggcggaatcacgtctgccgagtgaagtacagcaatctggcgtaacggtagaaaaatcgcaaagcagtttcctgttaatcctcgcggtgtatgacaaaaccaaccgcgccaccagttccgatatctccgactggctggtcagcaatatgcaggacccgctggcgcgcgtggagggcatcggcagcctgcaggtattcggcgccgaatacgcgatgcgcatctggatggatccgaccaaactcgcctcttactcgttgatgccttccgacgtacagtcggcgattgaggcgcagaacgtgcaggtctccgcgggtaaaatcggcgcgctaccgtcgtccaatgctcagcaattgaccgctaccgtgcgcgcgcagtcgcggctgcaaactcctgaccagttcaaagcgatcattgtaaagagccagtccgacgggtcggtggtgcgcctgagcgatgtcgcgcgggtggagatgggcagcgaggattacaccgctaccgctaatctgaatggccaccccgccgccgggattgcggtgatgatggccccggcgctaacgcgctggataccgcgacgctggtgaaaagcaaaatcgctgaattccagcgtcaaatgccgcagggctacgatatcgcctacccgaaagacagcaccgagttcatcaaaatctcggtcgaggatgttatccagacgctgtttgaagcgattattctcgtggtctgcgtaatgtatttgttcctgcagaacttccgcgcgacgctcattccggcggtagcggtaccggtcgtgttacttggcacctttggggtgctggcgctgttcggttactccattaataccctgacgctgttcgccatggtgctggcgatcggcctgctggtggatgatgccattgtggtggtggaaaacgtcgaacgtattatgcgcgacgaagggctgcccgctcgcgaagccaccgaaaaatcgatgggtgaaatctccggcgcgctggtggcgatcgccctggtgctgtcggcggtattcctgccaatggcctttttcggcggctcgaccggggtaatctatcgccagttttcggtgacgattatctcggcgatgatgctgtcggtagtcgtagcgttaaccctcactccggcgctgtgcggcgcgctgctaagccactccaaacctcatgacaaaggtttcttcggcgcctttaatcgcctgtgggggcgtacggaagatggctaccagcgtcgcgtactcggcggcctacgccgcggcgcggtgatgatgggcgcttacgccttgatttgcgggcgatggcgctggcgatgtggaaactgccgggcagcttcctgccggtggaggatcagggcgaaatcatggtccagtacaccttgcctgccggggcgacggcggtgcgtaccgccgaggtgcgccgtcaggtgaccgactggttcctcaccaaagagaaagccaataccgaggttatcttcaccgtcgatggcttcagtttcagcggcagcggtcagaacgccggaatggccttcgtctcattgaaaaactggtcgcagcgcaaaggcgacgaaaataccgcacaggctattgcgctgcgcgccaacaaagagctgggcgcgatccgcgacgccaccctgttcgccatgacgccgccatcggtggacggccttgggcaaagtaatggcttcactttcgagctgatggccagcgggggtaccgatcgcgatagcctgatgaagctgcgcagccaactgctggcagcagccaatcagagcggcgaactgcagtcggttcgcgccaacgatctgccacagatgccacagctgcaggtggatatcgataacaataaagccgtctcgctggggctgtcgctcagcgacgtgaccgatacgctctccagcgcctggggcggcacgtacgtcaacgactttatcgatcgcggccgggtgaaaaaggtctacatccagggcgagagcgacgcgcgcgctgtgccgtccgatcttggtaaatggtttgtccgcggcagcgataacagcatgacgccgttcaccgcgttcgccaccacccattgggaatacggcccggaaagcctggtacgctacaacggctcggccgcctttgagatccagggggaaaacgccgcgggcttcagctcaggggcagcaatggacaaaatggaaaaactggccgatagcctgccggcgggttccacctgggcatggagcggtatttcgctacaggaaaaactggccagcggccaggcgatgagcctgtacgccatttcgattctggtggtgttcctgtgcctggcggcgctgtatgaaagctggtcggtgccgttctcggtgatcatggtcatcccgttaggcctgcttggcgcggcgctggcggccacgctgcgcggcttaagtaacgacgtctatttccaggtggcgttgttaacgaccattggcctgtcgtcgaagaacgccattcttatcgttgaattcgctgaatccgcggtggatgagggctattcgctctcgcgggcggcgatccgcgccgcgcagacccgtctgcgcccgattgtcatgacctcgctggcatttatcgccggggtactgccgctggccattgctaccggcgccggggccaacagccgcgtggcgattggtaccgggattatcggcggcaccctgacggcgacgctgctggcggtgttcttcgtcccgctgttctttgtgctggtgaagcgtctctttacccgcccacgtccttctcaggagtaagttatgtttcgtttgagtttaatgttcatcgcgctcctgaccgcgggctgtgtctctcttgacccgcactacgagcgcccggccgcgccggtgccggcgacccttcccggcgcgcacggcgaatcaacggcggtggtcggcgactggcaaaaagtggtcaatgatgcgcggttaaaaaaagtggtcagcatcgcgcttaatagcaaccgcgatgtgcaaaaggcattggccgatattgaagccgctcgcgcccagtatggcgaaacgcgcgcatcgttgtttcccaccgtcgatgccgagctgagccatacccgcagcaaaacgatcgccagcggcctaagttctacctcgcaggctgacggcgcggtctcgagcttcgaactggacttgttcggcaagaaccagagcctgtcgcgcgcggcgcgagaaagctggcttgccagcgaattcaccgcgcaaaatacccgactgacgatgattgccgatttgaccaccgcctgggtgacgctggcgacggataatagcaatctggcgctggcgcagcagacgatggatagcgcggagaactcgcgcaaaatcgtcgctcgccagatggcggtgggcaccgcttccgccggtgatttaagttcggcggaaagcgtctatcagcaggcgcgagccagcgtcgccagctatcgtacgctggtggcgcaggataaaaacgccattaacctactggctggggaaaccgtgccggagagcctgcttcccggtacgctggagagcctgggggataacagcatcgcgctggtgcctgcgggggtatcatcatcggtactgttgcgccggccggatattcaggaggcggaacataatctcaagagcgctaatgccgatatcggtgcggcgcgagcgaactttttcccgtccatttcgctgaccgccagcgccggggtcggcagcgattcgctatcgtcgctgtttagccatggcatgcaggtgtggtcgttcgccccgtccatcagcctgccgctgttcaccggtggcagtaatctggcacagctacgctatgcgcaggctgagaaaaaggggctgattgccacttacgagaaatccattcagagcgcctttaaggacgttgccgatgcgctggcgcgccgggaaacgctgagtgaacagctcgatgcccagcagcagtatgttgccgccgagcagaagtcgctggatatcgcgatgaagagttaccaggctggggtcggcgactatctgtcagtgctgactgcccagcggacgctgtggtcggcgaaggcgacgctgctgtcgctgcagcagaccgacctcaataaccgcattacgctctggcaatcgctgggcggcggcgccagttaatgttcctcttcggacgcgttatagcaccttaatcactcctggcgcatgcgtaaactccaggttgcggtaataaaatattccacctttattaccgcaatatctctggctatacctacaattctcctattatcccaagcgtattaatcgtgatactcttcacatgaatggaataaaaaattccttatactgcgcgcaactgagaataacgaggtttttatgagtatcgacctgagcaaactgctgaccgagcgacgcaacgccaacagcgccaacattgacacactctccaccgtcgacatgctgacggtgataaaccacgaagatcagcaagtggcgcaggcgataacgccttatttgccgcagatcgcggaagtcgtggataaagtggcggcggcgctgcgggcaggcgggcggctgatttacatcggcgccggcacgtcggggcgtttgggtattctggacgccagcgaatgcccgccgacctttggcacccgtccggagcaggtggtggggattatcgccggcggacataaagcgattctgagcgccgtggaaaacgtggaagacaataaagcacaaggggcgatggatctgcagaaccttaacttcagcaaccgtgatgtgctggtggggctggcggccagcgggcgtacgccgtacgtcattggcgcgatggaatacgcccatagccagaatgcgtttgtcgctatcgtcagctgtaacccgcacggtgaaatggcgcagctggcggacgtggcgattaccccggtggtcggcccggaagtggtcaccggatcgacccgcctgaaagccggcaccgcgcagaaactggtgctgaacatgatctccaccggcgcgatgatccgcatcggcaaggtctacagcaacctgatggtggatgtcgaagcgaccaacgccaagctgattgagcgccaggtgtctatcgtgatggaagcgaccgactgcgatcgcgccaccgcacagaatgcgctggatgcctgtggccgccactgtaagacggcgattgtgatggtgttggctgacttaagcgccgcagaagcgcagtcgctgctggcgaaaaacaacggttatatccgcaaggcgctaagcaacacctgagcgccgacagacaggtaacaggcaatggcaaaaataactaaagagatgatagcgcggatcctggcccacgtcggcggggccgcaaacgtggcgcaggcgggtaactgcatgacgcgcctgcgcttgaccctgcgcgatgaaagtctggccgatagcgccgccattcgccagattgacggcgtgatgggggttatcgtcagcgatgaacagttccaggtggtattaggccccggcaaggcgcagaccgccgcggaaatgatgaacggcctgatggaagcggcgccgcaggcagccgcctcgctggcggatgtggcagcggaaaaaaagcaggcgctgaagagcaaacagaccagcggggtacagaagtttctcgcgaagttcgccactatttttacgccgttgatacctggcttcatcgccgtcgggctgctgctgggctttgccacgctggcggaacaaatcttcgtgctggagaacgcgcatcctaacgccagcctggtggcgctgattggttatatgaaggtattcagcaaagggatgtttaccttcctgagtatcctgattggctataacgctcagaaagccttcggcggttcgggcgtgaacggcgcgattatcgcctcgctgttcgtgctgggctacaacccggaagcgaccagcggattctacgccggaatttcgaccttcttcggccacggtattgacccgcgcggcaatattatcggcgtgctaatcgcctcgattcttggcgcgtgggtggagcgtcaggtgcggcggataatgcccgctaacctcgatatgatccttacctcggcggtgacgctgctgattatgggcgcggtgacctttacggtgattatgccgattggcggctggctgtttaccggtatgtcgtggctgtttctgcatcttaacggcaatccgtttggctcggcggtgctggccgggctgttcctgctggcggtgatgttcggcgtgcatcaggggtttgtgccggtctattttgcgctggtggatgcgcagggctttaactcgctgttcccgatcctggcgatggccggggccgggcaggtgggcgcggcgctggcgctgttctggcgcgcgaagcgcgattcgctgctgcgaacccaaatcaaaggggcgattattccgggcttcctcggcattggtgaaccgctgatttacggcgtgaccctgccgcgcatgaaaccgtttatcaccgcctgtatcggcggcgcctgcggcggtttcttcgtgggcatgattgcctggctggggctgccggttggcctgaacacggtgttcggcccctccgggctggtggcgctgccgctgatgacctccggcagcggaatttatgccgggatggcggtgtacgccggcggtctggcggtttcgtatttatgcggatttgtcctcacctggctgttcgccagtaaaaacgtcgacctgagttaagcgtattccccggatatggttgggcattcggtcggtagccccggtaagcataagcgctaccgggaaggcgcttagacgattttcatcttattgataccttttcgtgtttaaaaatcgagcacaaaatcgttatagttttgctcgaaaaataataatgattttccatggactgatggggtactgatgatgaaattgcgtttacgcacggcggcagcagtgatgctggctggcttgctgttagcgggctgtgaccagaagaatgacaatgccaaacacataaaagtcggcgtgattaacggcgcggaacaggatgtggcggaagtggcgaagaaggtggcgaaagaaaagtatggcctcgacgtcgagctagtgggctttagcggctcgctgttgccgaacgatgctaccaacgccggggagctggatgccaacgtcttccagcatcgtccctatctggaacaagacaacaaagcgcacggctaccacctggtggccatcggcaatactttcgtctttcccatggccggctattcgcgcaagattaaatccgttgcggatattaaagatggcgcgaccatcgccattcccaatgacccgaccaaccttggtcgcgcgctattgttattgcaaaaagagcagctgattaccctcaaagcgggtaccggcctgctgccgacggcggtggatatcaccagcaacccgcgaaacctgaaaattatggaactggagggcgcgcagctgccgcgggtgctggacgatccgaaggtcgatgtcgccattatcagtaccacctacctgcagcaaaccgggttatctccggtacgcgacggcatctttattgaagacaaaaactcgccgtacgtgaacatcattgtggcgcgtgaagacaataaagacgccgaaaacgtgaaagagtttatgcagtcgtaccagtcgccggaagtggcgaaggcggcagaaaccatcttcaacggcggcgcggtaccgggctggtaatcatctacgctgcgccatcaggtgcagcagcggcaccagagacagcccgtccggcatttcgccgcaggcgatcagctggtttatctcctcgaaggtaaaccagccggtttccatcacttcatcctgatctgcgtccatgccaacccagcttaaatcggtggcgagccaggtgataaacagctggtcgctgctgccgtatgacgggttgtagcggatgatttcctcagcgtgttgcgcttgccagccggtctcttcgcgcagttcgcgcagcgcggcgacggcgggctcttccccttcatcgacgccgcctgacgggatagcccacaccaccttatcgatcagatagcggtaatggcgaattagcagcactttgtcatcccggagcgccacaatcccgaccgccgggcgtgggtagtgaatggaataaaaatcgcgccgctcgcctggggcgacatcaatacctaccttgcgcatgctgaaccacggcgtctcggcgatgacctgtggattgtgcatatcggcggcggttagtttcttcttcatcctgccattcctgtagaaagtttaaccttcagaacaacatagccggctgcgattggcaaccgtcgcaggttggcccgattccatcgatcattgcccaaacgcccatattgcgccaggctggtactcagtacgatgttcgtcagattaccccacagaggaacgctaacatgaacatcacccatatccgcaatgctacacaggttattgaatacgcaggtaaaaaattcctgattgacccgatgctggcggacaaaggcgcctggccgggatttccaggaaccgcgcgcagcgagctgcgcaatccgctggtggcgttgccgttttctcgtgaaaaaattatcgacgtcgatgcggttatcgtcacccatacccatgacgatcattgggacgaggcggcgatcgcggcgatcccgaaaaccctgccggttttcgtccagcatgaggccgacgccgcgctgctgcgcagccagggatttcaggatatccgcctgctgtctgcagacagtgaatttgccggcgttagtctgcagaaaaccacttccgggcaacatggcagcgaccgtacctacgcggtaccggcgatggctgaacgtctgggcgaggcctgcggcgtggtgttccgtcatccgcaggagaagacgctgtggctggttggcgataccatctggcgcgatgagattgaagccgacatgctgaagctgcgccctgatgtggtggtgctgaacgccggctacgctcacgttatcggctttggcccgatcatcatgggcaaagaggacctgctgaaggcgcatttcgccctgccggaagcgaaaatcatggccatccacctggaggcggtcaaccattgtctggtgagccgcgaagagatgcgccagtacgtcgcggataatcagattgccggggtagtcagtattccgcaggatggggaaaccgttgtttattagcctgctcaaggggaagggatgatgaaattaaccgacgtggcgattgtcgccgttgagggctttagcccgtttcactactccgtcccctgcatgctgtttggcgatacggtctcggaaatcaaacgttttaatctgcagatttgcgccgaacagccggggttactcagcgcctgcgacggctttgcgctgtacgccagcggtgattttaccgcgatggaacaggcggatatcgtggtggtgccttactggggcgaggtcaaccagcgcccgccgcaggcgttgatcgcgagtttggttcgagcgcgcgataacggcgcggaaatcgtcggcttgtgcctcggcgcgtttgtccttggctatgccgggctgctcgacggtaagcgggcggcgacccactgggagttcgagcaggatttccagcgcctgtttccgcaggttcagcttgatatcaacgccctgtacgtcgatgaccagaaggtgattacctcggcggggaccgccgcggcgctggattgctgcctgtatatcattcgccagcgttttggcagcctcgccgccaaccagatcgcccggcggatgatcgtgccgccgcaccgcgagggcggccaggcgcagtttatcgcccagccggtgccgcgcaacacccgcgatgcgcggattaattgtctgctggattatctgcagcagcacattgccgagccgcataatcttgattcgctggccgaggtggtggcaatgagccgccgtacgctgacccgccatttcgcccgggcgaccgggatgagcattgccgactggttaactgccgagcgcctgcgccgcagccagagcctgctcgaggcggggatttaccggtcgagcaggtggcggaagcggtgggctatctttctgccgtaacctggcgccagcagtttaaagcacgttttggcgtcagcccgacggagtggcgccggactttccgccgcggcgtttagtcggcgagagtcgaactgtcgatcacgaagcgatatttcacgtcgcccttgaccattctttcccaggcttcgttgatctgatcggcgcgaattagctcgatatcggcgacgatgccgtgttcggcgcagaagtcgagcatctcctgggtttccgggataccgccgatcattgagccggcaatcgagcggcggcggaagatcagattgaacacttccggcgacggatgcggcgtggccggggcgccaaccagggtcatagtgccatcgcgtttcagcagcgtggtgaaggcatcgagattatgcggcgccgccacggtgttgaggatgaaatcgaagcttttgacgtgggccgccatttcgtcttcgttgcgcgacaccacaacctcatccgcgcccaacgctctggccgcgtcgcgcttggattccgaggtagtaaaggccacaacgtgggcccccatggcgtgggccaacttgatccccatatgtcccaggccgccgatgccgacgacgccgacttttttgcccggcccggcgtgccagtggcgcagcggcgaataggtagtgatcccggcgcacaacagcggcgcgacggcggcaagctgcgcttcgggatggtttatccgcagtacgtagcgttcattgaccacgatctgctgtgaataaccacccagcgtgtgtcccggcgcgtcctgggtcggcccgttataggtcagcaccatatggtcgcagtagttctccaacccttcagcgcactcctcgcactgtttacagctatccaccatacagccgacgcccaccagatcgccaacggcgtaacctgagacggcatcgccgaccgccgtcacccggcctacgatttcatgccccggtacgcagggatacagcgttccggcccattccgctcgcgcctgatggagatcggaatggcagacgccgcagtaggcaatggcgatctgcacatcctgtgggccgggttcgcggcgggtgatagacatcgactcgagtggctggctggcggagtacgtacctatagcgttgatctgcatagcattacctcttgtgcaatagcgtgataaatcaagcggaagggagtgaacgttttttgcgcggcaagggtaagcgtagcctggctaaggcaggatgagaaaagcgcagctcgaagggttaaaaaaggcgcctcaccgaggtgaggcgctcgtgatatcaaggcgcgatcggtgtcagataatccagccgcagtggctcggcgagcagggtttccatctggccgataaaggcctgaaagtagggctgggcgatatgctcatccagcgcctgctggtcgcgccaggactcacgcatgtagaaggtatccggcgcgtcgcgcagctgaaacagcgcgtagtcgagattgcccggctcctcgcgggttggcagcagcagcgcctgcagcgcgtcgcgcagggcctcggttttcccggctttcgccttcagtactgcgataagcgcaatggtgtcgtcgcgcatttagaaaccctccagcacgattttgccgaccgagcgcccggtttccagcttagcgtgggctttttgcagattggcggcgttgatggttccgtagtgctcgccaagggtggtgcgcagcgtgttatcgtcaatcaacgcggcgacgcgggtcagtagctgatgttgggcgatcatgtcatccgtctcaaacattgagcgggtgaacataaattcccagtgcagcgaaatgcttttcgctttcagcggcaccacatccaggctctccgggtcatcaatcagcgccagcttaccctgcggggcgagcgcggcgatcagttcgttaaagtgctgatcggtattggtcaggctggcgacgtgggtcacagcatgaatgccgattttcgccagtccttcactgagcggcttactgtggtcgatgacgtgatgcgccccggcttcgcgtacccacttctggctttccgggcgcgatgcggtgccaatcaccgtcatgttggtgagtttgctggccaactgagtgaggatagacccaacgccgcccgccgcgccgacaatcagcagcgtatcgccgccgttaccgccttcctgcacgccaagacggtggaacagcaattcccaggcggtgatagcggtcagaggcagcgcggcggcggaggcattctccagcgagcgcggcttcagggccacgatgcgttcatcaaccagctgcagttcgctgttgctgccggggcggcccagcgcgccggcgtaccaaacttcatcgcccggcgtgaatagcgtcaccgtgtcgccaacggctttcaccacgccaaccgcatcccagcccagcacccgaggggtatcggcattaaacccggcgcgcactttggtgtcgaccgggttcactgaaatggctttgacctcaaccagcagatcgtgccctgcgcctgcggatccggcagatcgatatcgcgtaaaaaggggatgttgttgccgtcagcggcggcctgggtaatggcaatggctttcataggttctccggtctacaaaaaggattcatggtgcgaatgcgtcgaggatagaccggtctagcgtcgggaaaaacggcccggcggcgataacagttatataaaaaaagtgaaaatcggcgaatgcgacaccacccatcctacgcccgcctgccactatagataaacagtgtgatggtcaggcgccaggaccatgatggttcaacaatataaattatcacaagcatagcgtttcatatttgagaaagtttcctccaccatgtcgcaaatattaatatcactccggcagaataataatattgcgttatggctcaaggtttataccttgactcccgacatcctgcgtgcgatttttcttctatcaaataataaacagagtttcatatttggaacaaaaataaaaccatcgtgctatttaattaagagtttcaccactgagacaaaataataagtcgatattaatcgacggtcttttatcgcttataaaaataaagtgagggatgtgctatgcgtaaaatactcctttcgctgctgctggctgccgcgaccagtgggcaggcgctggcggacgacggcaagccgttcccgcatatcggctggcgcagcgcggataatcttgccgggctggatttcggcggcgcgctgcgggcaaattatcgctatgaagactggaaaggcagtaattatcgcaacccgccgcatctgcgttttgataccttccgtatcgacagcagcggcttctatgataattatttttttgatgccgggttctggtttcaggatcaccgtaaatacgccatcgaccgcgcttacgtagggtatcgcttcgacaataataataatatccaactggggatccccggcaaaccatttggccttgaaccttatccgcaatttggctggtcctacggtatcccgttttatttaggctttggcgtgagcgccggtagcggcgtgaactatcaatatcatgataataactggtcgctggatgtggcctatttcccgtggatggagccggagaatttgcgctatgcgccggacgttggcgattacgatcgactgaaaaacactatctatccgactcagcatcagcagcataatgaaaagcgggaccaggtgaacgtgcgaatagcgcgggattttcacggcggcggttggaataacgagctgggcggctcactggcgctggcgcggttgcacaaccgcgagaccgacgacgatggcaccttctgggcggcaggcgtgcacggcatgttacataacgggccgtggcagctgacctcgcagctgattcgctaccaatacgatccgaagaacccggcgggcgtcagcgacgatacgattctgatgggcggcaacggcctgacgccggcctacctgatcccggcgaaagcgacgaccgcgtcgctgaacgtcgcccgcgatgtcgacgtgaagtggggcggcgtatcgaagctgcgtttttacaacgactacagcgtgctgtggaaagataaaagcggctggagcgattcgcagatgaacacccttggcgtacaggtctttgcgctgccggtaatgttctgggtcgatctcagctgggcgaagaacgttaatccgtggggtggcgcgctgaacgctaccggctggaccagcacccagtccgagggcagcggcaaatggtacttccgcactaacgtcaatattggctattacttctgaggcgggaattttccctgctcgcgctgcgctcagcagggctacggttctgcgccgtctggtagcccgggtaaggcgctagccgccacccggggcttgctcgagctatcagaccgtaggccggataaggcgcagccgccatccggcgcaaaagcggctctttactcgcggttattgcccggcggcgctacgcttgcgcgggcctacagatcacatgccgggcgtagtccggatgaggcgttagctgccacccgagggacttgctcgcgctatcaggcatcctgagctactttttaggccctgtttcccactgtagcaaaccggcgatatccttttcaccttcggcttcctttaagcgccgctgttgctcagcaaactgactatattccgcctgcgctttttcatcggccattttcttactgactttacctgcgccttgcaaaacctcacggtcgttaaattgcaggaactgatccagcttatccggccagtcgcgtaaaaagacctgctgacgacgacgggcctgatcctcggcaaaatccagccacatgttaactacgcggttaagctcattgacttcatcctgagtgagataattttttgctaccgtcacgtcacccttatgtacctcttcacctttatagctggtcagccccatatgcggcagactggcgtcagcacgttgatgaatgagttcagcggcggtatgccccggtacaggcaaaatgtaacttgttctggattgtttgaaaaaactgcgtggtttcttttaacgacggttgatagtcagccgctaatgcaaaaatctctcgcacccgcaaataaacgcggcgttcgctggcgcgaatatcgcggatacgctccagcatctcatcgaaatagtcgggtactgccgatgaacccacaggcggattcttcagccgctcatcgtccatcacaaaacctttgatcaggtattactggagcgtctgggttgcccactggcggaactgcgtgccgcgagaggagcgaacgcgatagccaacagcgagtatggcttcaaggttgtaatggtctatctctctggaaacctggcgttttccttcctggcgaactatccggaatttccggatagttgaattttgagcaagttcaccttcagagaagatattgattaaatgctcattaatagtccgaacgtctttatcgtacagttcagccattgtcgcctgggataaccagattgtgtctgactcaaagcggcattcaacgcgcactttcccatcaccgctggcaaacataatgaactcacctgctgggaacgacgttatattttcctttgcaatatggtctccgggtcaacctgttcacaacggtagagtatgtcagaagcggggcataaatttcattagacgaacgattactcttgcgcgtttgcgagcggttatccggaaagtgaaggtattaagacgcggggatttccctgctcgcgctgcgctcggcagggctacggttctgcgccgtctggtaacccgggtaaggcgttagccgccacccggggatttttcttgctcgcgctatcaggtatgttgcagcgtgccgttgacgcttttcagcgattgttgaatatgccgtaattcggctgttagcttctcttctttatcgctgagcggcagcaatacaatgcagccattcatcaccttaaccgtgaccggcttcccggtatcgaatcccgcttcgcgtagccacttgccggaaagggtaagacttggtgtactggtatcccggccattgggccgatagccaaccagcagccgacgctcggttccgctaacggtgatatctggggtagaatgcaaatcagccataatcaactccttgatagttggtgaggttagctctcatcaggtattgcgagtacctgatgagggcgattaaagatcaggacggaatctggttaggtacgtacctgggtggttatacattgctcttttaggtacgtacatgtcaacagccaaacgtgataccaatcagtcaaaatgcggcaaagctcccacttttcagatgcggataacgccgaagctgaaagcgcagtttgaggccgctgcagcagacgcagggatgagtttgggaaactggctcaagaccctgggaagaaaggagttggagaggctaagcattgagactactgataagtaaactttaacgatcgatttaactttctgttcgactaggaataccaacgatctccatttttatagcgccatcatcagagaatattgatgccaggccctttcttatttttaattgatcgttttcaatttcaccgtgtgcaatcggtgagtagatagcggtttgcaactgaacgcgctcaaaatcataaccaatatctttggcaatggctgaaagaagatctacaaataaattattgctggtctgattccagataatgccgcttgcattatcgttgtttggatatgttgtattaagatgtgagaaatatagcctccatgctgatattacctgattttctgctttgcttcttttagcttgtcctttccttacccgaccgtaaaaagcaatatcgatcatattgagtgctctgacatgttcatttgatagccttgcgttctgtgacctggtggccatcaattgtttaaaaatatctattttacgtgtctttttatcagtatatctttcgataaatttctgaacttgaatggcaattacagggctgattaaagtcactatcaccgttgtgatggatagcactaaactcattttagaatccatatttttatgagatataaagttagaataacgaaggattcaatagggtaagttatcaatagaatatttaatatatgccgaatggccgatagagaaggaaattttggcggaagatcaccggagtgatgaagtcaatatagttaattgattttattgtgttttgttttgagtaaaaaagagattatacacatttgtgagagtgcagatcatcctaacaatctcacattgttcgtaatacaatcaataaaattgctaggaagttttcaaaataaatggattattcaattttgttatgaagattttgaatccattttatttcttgaaaatattttctgttcagcttcgtgtaaaaatgagggtctatatcttttgcataagcaatataacctgaaagtttgttataatcttcatcttttaatactccctttgataaaagagaaagatgtaatcttatcttatctttcattgacctatgtaatgtaacatggaaatcatgacaaactttcaacccggttactactatactgccacccgaagcactacagatcttgaactttttaatgtttattttaaagtctggcccaatttctttcatcgcggttttaaaacaatttagaattattttactagctcctttcacatttgtagatacaataatatcatcagcatatcgtgtataagtagcattaagtttatcaattttgtttagttttctagtcagtttttcatcaagctctcttgcgacaaagtttgcaattactggtgacgtcggaaatccgatagggagagtactatctgatatgaaacaaattgtttttataagttgtagtaactctttgtcatactctgtagtaaattcaatgcgatctctataacgagtgaatgcattttcaaaatcactaaatttaattgaaggaaaaaaatctttgagatctatttttacataatatttattctttgattcagcatgcaataaagcgttgctttttattgaacggtttttgacaaatgcatatgcagcattatgcattggcagcttagaaaaaatattattcattaaccaatattgaattagttttactttagatgatgggtggtatattgttctcataccgccttttttcttagctatatcccatctttttggaggctcaggtgaccgcattacttctgaagtaaatcccttagtcattaatgtctgagaatcaatcaggctatatattctcatataccttcatcctttctggtttgttcttgaggaaaaaaaccttaaacattgatgagatgttgtcaatatcaaaatcatatttaaaataatattctttatacaaagaataataaactccatttgtgcatgatattattctgatagccattagaataccaagatgctttagaaggttttttttgtaatggctttctgtaccaaatattttggtgattatttcgataagttcattaagctgtaaagggccacatacaaaaattatatcatgaataaatcgaacagagtctttattaaagttatttgaaggatctaactcttccttttttaaagatcttgaaattgctctctcattcttagaaagaatatcatatagatcatcgaatatttcgccaataccgtcagagcgctctatgctttcaataccttctgtcattttataatgtaagaaatgaccagattgttgtgattgctgagtaatagctttgattggtcccatatttataaatgatttctcatttataaattttgtattgttaactattattaatttcttgcgtaattgcttgctgtatgcgaatgcaccaagttccgtgaaggaagaatagctttctaaaacaatgataatatgatcagctaattttgataagtcagcttcgatatctaataaattatcagataatgattcttcatctgtgcttaattctttgaaaactagttcagcaagaaaaaaatggcaattattcaaatacctttcagaaaaatttattaattccaatcgtcttgctgatggttctccattatttttgtttgcaccacacagaaagacgaatttttttacgttaccaggacattttactttgttcttttcaacgaatgatgaaaataacgcggttgctctggatacctcagtaccatttttttttagctgagtcagcatcgagaatatccttatgcatcttgatggtagaggactaaaagagccaaacctacttgagcacgtcgatcagttcgctgatcggtggccccagccgccgctcagcgaactgaacgacgggcatagctaaaatactaggcgaaaccatgactcatggcccgatgggctattaacccataaaatgctaggtttggctctgttacgctctcataaacctcaagaggattcaagaggaaagctattgatgtgaagtaattttcttttatccaagagctgagaaaaagtttttttgcatttaagagttcacactgttcgcctattttttttatcagtaatttcatggtgatacagggtgaacagtggattgttcaccttatggcaatggccagaaagaaaaagaccggctgttaccggcctgagtgaggttatgttgctgcggggtcgtcgcatttcggcagccagtcgccgtagttttcctctttcagcgacaggttggtctgtatcccctgctttgtgtgccgcttctcataattcaggccgtactccttcagcatcatgggcagccccagcctgaacattttcaggctgagcacgtttctgtacccgttggcctccatataggccagatacgcgtgatagagatatttacggtaattacgcgggacaatgctggtattccccataaacatcccgttggtctgcggcagcatttccagatagccgcaaaaatcaaacgtcgggtcagcatcgtgcttgatactgagcgcctcgtcggagttctgctgcggctggagcagtgcgcgggcggtcattggatcgctgaatttctgcataagctcacgcaggatgacggctagctcgcgcgcaattttatccctgagctgcgggtcgcgttctcccggggcaatctgctccgggaaatgaataatcacccggcgacgtgagatgccgccgctgcggtcggtgaagcgcatcgggttgttattgacgaccagaatgaccgccgaatatgtgttgagtacggattctggtttttcgggtcaacgaagaccgcatcaccgccactgatggccttaagccctgtgccgtcaccgctccatttttcctggtcagacggacggataagcgagaaaccaatcagggaggcacgcttgcgcgggtcttccagcgtgtcgatgtcggccgacgtggcgttatcatctccggcgagcagggttccatttaattttctgtattagaacctgaatatcaggtttcgctgaaaatgttctcttagtgttagtcatccaggaacgatggaggtggggcaaacttccagccagccttcctgagtcgaaggcttaaagcaggttgtggtggataaaaattatgtgaagtgcctatagcttccgtcatagactaaaagacatacttgagttatattttaaccccatttaaacgaatgttaataattttaaatatggaaatcgtaggctctaatttaaaaataataatgccagtaataatgttgggtttgacttttctcttgaagttatgggtggtaaatgtacccaaagctccggattaccttaaggcattaattgaacttcctgtttctatttcgttattaagcgtagccatgtttattagctattccataacagtaggggtaaatggcaaacaacattctgatggtatagccttttttgctttagccttatttattactttcatagtcattgcaatatggcgtggttgctgcattctctttaataaagaatgttggtttgcattggggctttgttccattggaaattatgctctagcagttagttgtgctatattttcaattgtgatggtcgcaggagtataaaatgtcacaaaatacactattgattgttacaattgctatggctttggtttctactttagctcttgtattttttctattaataaaaatcatctcaaagagtaaaaatgatagttacgatgaatacagaaaacaagcttatatagaaatgatgagagagtcatacgaaaagcaaatatactcattgaacaaacaaatgatgagtaatgagaaacgatgggaagatatcaatcatcttttagtagaatcgcaatataaaaacgcttctcgtaaagattctgatgaggattttttcaaaaacttaggcattaacaaaaacgaaattattgaaaaaaggcaagtttttgtcttaacacccttcaacgaggtttttgatgatatttatgaggatgtcaaaagtattgtgtcttctacaggaattccgtgtactagaggtgatgaggaaattaaaacagggaacattttgtcgcatattgttcaattgctgctcgaatcaaaaataataattgcaaatattgatgggcgaaatgcaaatgtattctatgaattgggtattgctcatgcgctaggtaaaaaaacaatactaatttcttcggatttatctcaagtgccctttgatatgaaaacgcaaaggattttgttttatactcacaaaagcgaattaaaagataaacttcttccttatttggtttcgagtatttagctataagcccttagttaagaaaatataactaagggctagttacttcttaggggtaaatattatctgcataaaactgaagtatcaccctcctattttctaaatattgagcatggttgtaagtgccacggatgctgtttttagctacatgcgctaactgcatctcaatccatgcactatcaaacccttgttcatgtaggattgtcgacattatgtgtctgaaaccgtggcctgtagcgcggcctttataaccaagtagctcaatcacctgtgaaacactttcctttgagatcggcttactatggttattcctaccaataaaaatataagggtagtggccagtaataggcttgagttgcttgaagaggtcgattacctgagtagtaagcggcactatgtgagatctgcgcattttcatcctttctgcagggatttaccatatcccctttttaaggtctacttcttcccacgtagcaaagcgcatctcctgaattcttacaccagtaagaatgactatccttgtagcatttttagtgatgatactgccggtgtaggcttcgagatcccgaataaaatgaggcaattcttcggcagataaaaatggatgatgtttttgcttaggagttaccaatgcgatagctaaatcaggtgcaggattgtattcagcgcgaccagtgatgatcgcatagcgataaacctcaccgcatctttgccgcacttttctggtcttctccagcgctccacgcttctcaattcgccgcagtacctcaagcagctccagcggtcagctttgttggcgtgccattctcgacatatggcttcgaatgagttctctgctgatagttgctgtgccagtttttgggctttacgttcttccactgggtctatgacgtttgctacctgcttacgagttgtatcgcgtttctcacgtgcttctgcaaggctcacaaggtcgtagcgttcaaatgacatgaaaagcgcttcccagcaaagcggaaacgctcattcttcgaaccttcgggattgatcggcaatgacaaatttttcccatcattcaatgagtatggcttgtcttggggctttgctcgtttaattcgtatatctgtcagtgccatgtgtataagccaaaaatgtgtataaaaaatctttacacaaccctatacgtatttttcatgaattcagggtgattttgtcggactgttacgaatgaacaatccactgtatttattgaaaagaagttttttagaagttttcggatgagcttggagagaaactttggcggaagatcacaggagttgaacctgcccgggaccgctggcggccccaactggatttgaagtccagccacctcaccggagatgacgatcttccgcgcctcgattgctacatggaggcgggcgcattatagctactttcaggcatttaccacatacctaaacgcacttttttactgttaaaactggactttgcagaacagtcttagacaaatccgttcaaaatccatgggttacactttttcacactctttcgggctaccgcgatcacagaaaacaagaaacgtaatttgataacgagatatcgcaattcatcttactgcgccaaagggttacaaaaaccgtaaccggtaccaatccgcggtgccgctaagggaatagtgcgcaaatgaaagatcatattctgtccgtcaaagagaaaattggctacggtatgggtgacgccgccagccacatcatttttgataacgtcatgttatatatgatgtttttctacaccgatattttcggtatccccgccggctttgtcggcaccatgttcctgctggcgcgggcgctggatgcgatttccgacccgtgcatgggcctgcttgccgaccgtacccgcagccgctggggtaagttccgcccgtggatcctcttcggcgctataccgttcggcctcgtctgcgtgctggcttacagctcgccggatttaagccacaacggcaagctgatctacgccgccgtgacctacacgctgctgaccctgctctacaccgtggtgaatatcccctactgcgcgctcggcggcgtgatcaccgacaacccgacgcagcgcatctcgctgcagtcctggcgcttcgtgctggcgacggcggggggcatgctctccaccgtgctgatgatgccgctggtcaactttatcggcggcgaagataaagcgctcggcttccagggcggcattgcggtgctctcggtggtcgccttcctgatgctggccttctgttttttcaccaccaaagagcgtgtcgaagcgccgccgagcagtacctcgatgcgtgaagacctgcgcgatatctggcgcaatgaccagtggcgggtggtcggcgtgctcaccatcctcaatatcctcgcggtctgcgttcgcggtggcgcgatgatgtactacaccacctggatcatgggctcggcggcgctgttcaccgtcttcctcaccacctactgcgtcggcaacctgattggctcggcgctggcgaagccgctgaccgactggaaatgcaaagtcagcgtcttctggtggaccaacgccatcctggcggtgctcagcgtggcgatgtttttcgtaccgatggacgccgaaatcaccatgtttgcctttatcttcgtcattggcgtactgcaccagctggtgacgccaatccagtgggtgatgatgtccgacaccgtcgactacggcgaatggtgcaacggcaaacgcctgaccggcatcagcttcgccggcaccctgtttgtgctcaagttggggctggcgctgggcggcgcgctgatcggctggatgctggccggcggcggctatgacgccgccgctaaaacccagaacagcgccaccctcaccatcattatcgccttgttcaccttcgttccggcggtgtgctacctgctgagcgcggtaatcgccaaacgcttctacacgctgaaaacgccgttcctgaaaaaaatgatggccgagctggccgagggcgcgcgtcgcaacgaacaagagttcacggcagccccgatcgacaaagaatggcaaaactaagaggacgttttaatgaaaatcagtgatggaaactggctcattcaacctgggctcaacctgatccaacccgtacaggtttacgaggtggagcagcagggtaatgaaatggtggtctatgccgcgccgcgcgatgtccgcgaacgcgcctggcagctggatacgccattgttcaccctgcgctttttctcgcctcaggaagggataatcggcgtgcgcatggagcacttccagggcgcgctggataacggcccgcactatccgctgaacgtgcagaaagacctccatgttgaaatagaaaatacggccgagttcgccgagctgaaaagcggcagcctcagcgtgcgggtgactaaaggtgaattctgggcgctggattttctgcgcgacggcgtgcgtatcaccggtagccaactgaaaaacaacggctacgtgcaggatagtaagacccagcgcaactacatgtttgagcgcctcgacctcggcgtcggcgaaaccgtctacggcctcggcgaacgctttaccgcgctggtgcgcaacggccagacggtagaaacctggaacgaagacggcggcaccagcaccgagcaatcctacaaaaatattccgttctacctgaccaaccgcggctacggcgtgctggtgaatcatccgcagcgcgtctccttcgaggtgggctcggagaaagtctctaaagtccagttcagcgttgaaggcgaataccttgagtacttcgtgatcgatggcccaacgccgaaagcggtgcttaaccgctatacgcagttcaccggccgcccggcgctgccgccggcatggtcgttcggtctgtggctgacgacctcgttcaccaccaactatgacgaagcgacggtaaatagctttatcgacggcatggccgagcgccatctgccgctgcacgtcttccacttcgactgcttctggatgaaggccttccagtggtgcgattttgaatgggatccgctaacgttcccggacccggaggggatgattaagcgcctgaaggcgaaagggctgaaggtctgcgtgtggatcaacccgtacatcggccagcgctcgccggtgttcaaggagctgaaagagaaaggctacctgctgaagcgcccggacggttcgctgtggcagtgggataagtggcagccggggctggcgatttatgacttcaccaacccggaagcctgccagtggtacgccgacaagttaaaaggcctggtggcgatgggggtcgattgcttcaagaccgacttcggcgagcgtatcccgaccgatgtgcagtggtttgacggttccgatccgcagaaaatgcacaatcactacgcattcatctataacgagctggtgtggaaggtgctgaaagagaccgtcggcgagcaggaggcggtgctgttcgcccgctccgcctcggtgggcgcgcagcagttcccggtgcactggggcggtgattgctacgccaattacgaatcgatggcggaaagcctgcgcggcgggctgtcgatcggcatgtccggcttcggtttctggagccacgatatcggtggtttcgaaaacaccgcgccggcccacgtttataagcgctggtgtgcctttggcctgctctccagccacagccgcctgcacggcagcaaatcctaccgcgtaccgtgggcctacgacgaagagtcctgtgacgtggtgcgccacttcacgcagctgaaatgccgcatgatgccgtatctctatcgccaggcggcgctggccaatgagttcggcactccgatgttgcgcgcgatgatgctcgaattcccggacgatccggcctgcgactatctcgaccgccagtatatgctcggcgattctgtcctggtggcgccggtgttctccgaagcgggcgaagtgcagttttatctgccggaagggcgctggacgcacctgtggcataacgatgaattgccgggtagccgctggcataagcagcatcacgatgcgctgagcctgccggtctacgttcgcgacaacaccctactggcgctgggcaacaacgaccagaaacccgattatgcctggcatgaaggcaccgccttccagctgttccatcttggcgatggcaatgaaacggtctgtcaggttccggcggccgacggttccgcgatcttcactctgaaggcgaagcgccagggcaacaccatcaccgtgagcggcgaaggcgaagcccgcgactggacgctatgtctgcgcaatatcccgcagatagcgggcgtgcagggtgggactcaggtcggcagtgaactgggcgtggtggtgagcgcccagggcaatgcgctgacgattacgctgtaaataacaactcccgcagcatatcgcgggagttattctttctgcgaatttgagatcgttatcacgtatattaatgactgaaatgtgatctgacgtataaatatcagtcctttctctgtcttgtcttatttctgtccggatatccggacacgatttagtattgttgtttactccccgcctccctatatttatcctcaatgattttcatcgagatcgcgccgtatagcgatatcttattggcattaatctgctatgcaaaaagggtaaataatgcaaatggttacctcgcgacagaacagattattaaaatttctcttgcctaaacgagaatacgttacgttattaaaaatggctgaatacttgaatgtttcagaaaaaacagttcagcgtgatttacgctttctcgaacaatggctctctgactggaaaatcagtattgataaacgtgccggcgcgggcgtcatgctattggctgataacgtcgccgatctgttgcaattagaccagttgctcagtagcgagaacgatgatgccgatgccatgatgaataattcccggcgtgtgaaaattgcttctcagttattaagtgaaacgccgcgtgaaacatcgatcagtaaattgtctgaacgttattttattagcagcgcctcaattgtgaatgatttaaaagtgatcgaatcatggattaggccactgggtctggtgctcattcgtagccagagcggcactcatattgaggggagtgaatcccatgtgcgccaggctatggccttattaattaatggtgttattaaccataatgaaccaggaaatattattcactcccgtctggatagcggtagctataaagcactggtgcattatttcggtgaagaagatgtcatctttgtgcagtcgcttcttcaggatatggaacgaaaattaagttggtcgctgggcgagccgtattacgtcaatatcttcacccatatcctgattatgatgtatcgcatcacccgcggcaatgcactaccgcgccgggagcagggacatccattatttgatgagtccatctttcgtatcgcgcagaatatgctgcaaaaaattgaggcccgcattgcccatcctttaccagaggacgaaagctggtttatttatcaatacattatttcgtccggcatgctggtggaagagcgtgatgatgtcagcatgctgcgcaatatacgctccagcgatgaggcccggcaaatcacctcccggctgattgccctattttcctcggtggttgatatcgatctgacgcatgacaccgcgttatatgaagggttgctcattcatatcaagccgctgctcaaccggctgaattatcgtatctatatccgtaatccgctgctggaagatatcaagggcgaattaacagaggtgtggccattaactctgcgggtggtgaatcaggtatttgccgcgtggggcgagaacgcggtttcggaagatgaagtgggttatttaaccgtgcatttccaggccgcgatggagaggcaggtggccagaaagcgggtactgctggtgtgttcgaccgggattggtacctcgcatctgttgaaaagccgggtcctcagggcctttcctgactggaccatcgtcggcgtactgcctgcgggtagtctacatacgctacagcgacaggatgatattgaactggtcatttcaaccattcatctgccggagattgcgttaccggtagtctatgtcacggctttttttaacgatgccgatattaagcgggtaacagaaaaagttatcaccgagaaattacaccatgctgcaacgtcaactgccagcaatgaaattttatatccatgaggtaaataatatggacatcagccggattttaaatactaagcgtgtattgctggatatgaaggccacgactaaagcggaagttattgaagaattaactgacctgctgcagaaagatggggccataagctgtcgcgaaacgtttattcaggacgtttggcagcgtgagtcggaaggttcgaccggatttgaaaaccacatcgctattcctcatggaaaatcatccgcggtgctgaatactacgctcgccattggccgtactcgtcaggatattgcctgggaaacgctcgatggaagccaggttcgttgcattattttatttgccgtccgtctggaagatcaaaataccacccatatccgcttactctcccaggtcgctggagcgttggccgatgatgacattattgcgcaattgctcgaagaaaccagtccgcagaagattattgatctctttagtcaatatgctgaatcggatgtttactaacaataactattggagtctgagatgaatattgtctgtgttgccgcctgtacggcgggtattgctcatacttatatcgcacgtgagaagttaatgaaaggcgcgaaagcgctgggccataatgtcaaagttgaaactcagggaacaataggtactgagaatgaactgacaactgaagatatcgctgccgccgatgtcgttattcttgccgttgatgtgaaaattaaaggcgaagagcgttttaaaaacaaacgacttgtccgcgtgaaaacggaggtcgttattaagtcaccgattcagtttatcgaaaaggtcgagaaatccttagctaatgcctgatccttattctggagggatctaccatgagtgagaataaaacacctgtcttgcaggaaattaaaaagcatttgttaacgggtatttcatggatgataccgctgattgttgccgccgggatctgtattgccctcggtcaggttctgggcggtaccaatgtcgccgagaaagtcggcaccattccatggatgttgaatcaaatcggcggttgggggatgggactgattgttccgctcatctgcgcggcgattgcctattccattgccgacagacctggttttgcccctggactgattgttgggtttgtctgcgggcaaatccacaccggtttcatcggcgggatgctgggcggtttcctggtgggctatacggtgctgctgttaaagcattacgtgcggttgccaaaatcgatgcaagggctgatgcccattatggtgctgccggtattaagcaccattatcagcggtctgttgatgatgaccctgataggcaagccgattgcctggctgcaggaggccttgattcatctgttggagtcgatgcagggcggttcacgattcctgttgggggccattctcggcgcgatggccacctttgattttggcgggccggtgaataaaaccatgtcgttattcgccgatggcttgctggtgagcggggtctatggtccggaggcggtcaagtttgtcggctccatgatcccgccgttcggtattacgttgtccttcctgctgacccgccataaatatacccgtgctgaaagtgaagcgttaaaggccgccttcccgatgggtatttgcatgatcaccgaaggggtaatccctatcgcggcccgcgatctgctgcgggtggtgggatcctgcgtcgtggcttcagcggtggctggcggcttgattatgacctggggtgtggaaagcccggttccacatggcggtatgtttgtggtgccgctattcacccatccactgctgttttgtctggcgctggcgattgggacggttatctgtggcgtgatgttgtcgctgtggaaaaaaccggtcacggagcgtgatgaagagtttgatgaactgagcgaccaaaaagtcgccgatgatgaaatcacctttacccttgagtaaacggaggccctatgtttgccgatatgaagcagatggttgagaaagcctggcgtgaacagtatgccctgctggcgattaactgtatgaatctggaaagcgcccgcgcggcggtacgcgtggcggaaaaataccgcgcgccgattattctcaatctctatcagggccatctggcgcattttccgccagcgacggcgatggcggtggccaggacccttgccgaagaggccagcgttcccgtgaccttgagtctcgatcatgggaaagaaccagtgaagatccgccaggcttttcgcgctggattcagcgggttgatgattgatgcttctgcatttccacttgcggaaaacatccgccagacccgcgaagtcaccactctggctgccagcatcgggttgtgtgttgaaggggaattggggcatctggcggatgctccgcgttatgactctgcgacgaatgccgacctgatgacgcaacctgaggatgtcgccccgtttatcgagcaaaccggtatcgacttactggcggtctccgtcggcacggcccacggcatgtatgcgcctggggttacgcccgcgctggactttgaccgtctggcgcaggtgcagcgagcctcttcggtgcccctggccctgcacggcggcagcggcacgccatttgatcagcttgcctgctgcccggcatttggcgtggcgaagattaatgtcggcgcggcggtgtttgaggcaggtaaagccgcactactccataccctttgccatgacagctctattgaactggccgatgccatggcggtgatggaacacgccagcgctgaagctatcgtcccttacctacaagcatccggcgcgataaaccgcgcctgattcacttatcagtcacgccctttatgccagcgcatattcgccctggcagggcgaactacaccctgaaactggagaagaccatgttagtttccatgcaagaaatacttaaaccgactcgtgaacacggctttgctatcggcgcatttaacgttgcggacagctgctttattcgcgccgttgtggaagaggcggaagcgaccaatacccccgccatcatttcaattcatcccagtgagcacgactttgtcggcgattccttttttagctacgtgcgggatatcacccagcgtagccgggtgccgtttacattacatctcgatcatggcgcctcggtggagcatgtgctgcgtgcgatccagtgtggttttacctcagtgatgatcgatgggtcgctgctgccctatgaagaaaacgtcgctctaactcgggaagtggtcaggttggcgcatgcggttggtgtctctgtcgaaggtgaactagggaccatcggccagacgggaacgtcggtagagggcggagtgtcgaaagtgacttataccgacccggcgcaggcgcaggattttgtcactcgtaccggcgtcgataccctggcggtggcgattggtaccgcgcacggcatctatccaaaagggatgcaacctgaattgcagatgcacattctgcgcgatattgccggacgagtgtcgatcccgctggtactgcacggcggctccgccaatccggatgcggaaattgccgagtctgtcacgctcggagtcgggaaaatcaatatctccagcgatatgaaacacgcttacttcctgaaagtacgtgaaattttgagtaaagagagctggtgggatccgaatgtgatttatccggaaccgattaatgccgcacgtgaagttattcgccacaaaatgaagttgtttggttccaccggcaaagcaagcttgtattgacccagtcggaaggcgggagtacccgccttccaatcggcaggaggcaaagatgaattacctcggactggatatcggtgggacgaaaatcgccgccgtcgtgatggatgagcagggacgggagcgggggcgttaccgctgcgcaacacgcaaagaaaaccgtcaggcatttatatcgtgcatcgtggatttcgttgccgatattcgcgcacggacgggatcgccgatggctattggcatcgcgttgccgggcagcgtttcgccacagcatggcgccattcgtaacgccaacattcaggtgattaacggttatcgtttacaggatgcgcttgaacaggcgctcggtcagccggtggtgttagccaacgatggcaattgtttcgccttatcagaagcatgtgatggcgccggagaagggttttcatcggttttcggcatgacgttaggaaccggctgcggaggcggtattaccctggagcggcaacctttcgttggagcctcaggtattgccgcagagtgcgggcatatcgccttgcccggctattctcctgaggaggatgggccgccggcgcgttgttattgtggcaggtttaactgtgtggagtcctttatttccgcaacggggctacgtgaacgctatcgactgctgagcggagagagtttgtcgagcgagcagattcttgcccgcgcgcaggcgggagaatccgtcgcttgccatcagatccaccgctttcgtcaacagctggcacggacgctggcgactgtcgtcaatatcattgatcccggcgtgattgtgttgggcggcggtttatccaacgcgccgcagctggtagcggatttaccatcggcggttgcaccgcttgtcttcaccgaccatttttccacccctatcatttctgcgcggcatggcgacagtagcggtatgcgcggcgccgcctggcttgccgtgcgaagcggagttaaaccatgaaacgttcccagattaactatgcgatagataaagcgctggcgatggccgaaacttttcgcatcagcctgccggaatttgcccactttacggcgtcaagctggccacaaaaacggcatgaaggttggcatgaagtccaggatctacagcttggatgggatgtgacggatttcgctagcggttgctttcgcgaaacgggcctaacgctgttgacgttacgcaacggttctttatccgacccgcgttataccaaaccctacgcggaaaaaatgctgcagattcagcaagatcaacaaacccctggcatttccattaccacaaaatggaggacatcattaaccgcggcggcggcgacctctgcatgcaactggcctgggcgacacaggacgaacagttagaccaacagcgccatgttagcgtgatgatcgatggctgccagcgtacgctgaaacccgctgagacgctggtgctgcatccggggcagagcgtctgtctaccggtgggcctctatcatcgcttctgggccgaaaaagggatagtgatgggttgggaaatttcaatggttaatgacgaccatacggataatcgttttctcgaggcgggcgggcgctttccctccattgaggaagatgaacctgcaagatggctgctgtgcagtgaataccggcagtgacgttgagagccatcccacagaccgatttgctctccggtggtagcgtaatctgccgctgagaggagcccgtaatggacttagaaaatatctttcgtgacgtgaagttgagtaaaaccgaaatgaccgtgctgcgttttattcaaaatgacccgcagctatgtatccgcgaagggatccgcaccgtcgcggagcgctgctacagtaatccttcttcgctggtgcggctggcgaagaagcttaagttcagcggctggctggagctggtctatttcatcaagttcaatatcaccatgccaaagctcgatgtcaccaacgatattgattatatgagcattcagccggcagaagcgctgacgccgctgctggcaggccttgagcagcagcgtattttgatccacggcagcggcttttcgcagctgatcgcccagtatatttataataagtttctcgttaccggcgtgaacgccagcctggcattgtggcccgattacgaaatccttgagcaaaaaaacgctgcccgctttgattctatctggatcatttctaaatccggacgcagcagttcggcgttaaattgggttaaggcgctggaaggcaaggagataaacctggtttgctttaccggcgattatcaaagcccgctggcgcaggccgcgaatacggcgtttattattcacgacccgcagaagttcgacgatgatatttactggagcaacccgttttttggctactgcatattgggctttgagcggttgttaaaaatgtggtttaccagcgtacgtagcaataggtagccccgctaagcgtagcgcgagcgggggagttcccggatagcggctggcgccttatccgggctactcaatcgggcgggggcgactcgttaccgccacccggcgaactgttcatcgtcgagataggcctcaaccagcttcttcgccagcgaatatgaaccgaccagcggatgagccattaacgcccttaccgccagcgattggtcctgctgcagaattgccgccaccgccagccgctcatactccttcacgctggcaatcatatttttctgcgccgtcggcacgtttatcggtgtcaccggcttaagaccctctttgctcagatcgcagctgatttcaattacatcgtcggggcgtaaaaaatcgagcgtgccgttattctgtatcgacaccacgatgcgtttggtggtggtgctgttgaccgcctccagaatatccagcgccaccccggcgtagcctccggtatccggctcttcgataaactgccgcagcgttagcggctcgcgggtatggaatttttcctgctgcgactcgttttgcatatagctgttttcgcggcgtaggtagtgcttcatccagatggtaaaggccgcctgcggctccgctttaacatccacgccgctgagctcctgacgcatatcgtggttgatacgggcaatctgctcgccgcgggtctccggcgcctgttgaatcgcccgtagcgccacttcgcgatagtagtagtaatagagatactcgttgagcaactggttatcgcacagtttgaccagctccggcgagaagtactgcatcgccgttttgcggtataaatccgggttggcgaccagctgcgcggtaacctcttccccgcgcacggtgaagtgcgtaaaccaggaaaagtggtttaagccgtagcattccacgctcaggtcgtgcgcatcgcagccgaggatctccggcagctcgcggatgagctccgacggcgcatcgcatatcccgtacacccggcgtttgaaaccggatttgataatcgcttcggtgaccagcccggacggattagtaaagttaaacaggatcgcgtctttgtcggcgtgttcctcgatcagacggcagtagcgcaggatcgccgggatcgagcgcatcgccatggcaaaaccgcccgcgccggtggtctcctgacccagcgtgttatgctccagcgcgattcgctcgtcgcggatgcggctctcatcaccgccgacgcgcagcgtggtaatcacgtaatgggtaccctgcagcgcggcgaccggatcgctggtggtagtaaaatgaatatccggtcgaatggtattaaatacatagcgggcgatttcaccaaatagcgataaattctccgctgagctatcctgaaataccacttccgttaaaccaatgcggtgcgcgttataagccagcgactttgccagaaatgcagagcgcacgccgcccccgcctaatacggttaatttcatacatcactcccaattaattttctgctagccagctatcaacccgggaacggacttgcccgactttgacgccataaataacctgaacttcattacgattgcgtactacgccatttgcgccggtgctttttaatatttcatcatcaactaatgtcatattatggacaaccacccgcaggcgcgtgaaacagttatcaacggagataatattggctttaccgcctaagccattaataatttcatccgtcatcgactgcgggccgctgacttttttacggtagtccgccttactgtataacttaacgttatcgtcatcctcgcggcccggcgttttcagatttaacttcactaccagcgtgcggaatatcgcgtaataaacgataaattggccaataccgatcagcacgtaccccggccagcgggttaacgacaccggcagcggcaggttgtagatcagaaattcaatcagaccggaggcgccccacggccgcacggtgaagatgtcgcaaattgcctgcgaagcggcggtcaacgtcgcatggatcacccacagcagcggcgagacaaataagaaggtgaattcaatgggttcggtgatgccggtcagcatcgaggtgataattgccggcagcagaatcgccttcgccatcgctttcttctccggcttcgcggtgtgataaaacgccagcgatgcgcccgccaggccaaagatggtggtcatcccctgttgcgagaaacgtaatgcgtcgttcatcaccggcgtcagatcgggatggcgcatataggcgaggaaaatcgcctgggtgccggagacgacctggccatcgacatttagcgtgccgccgatttgcgtgagctggaaaggcgaccacacgaaatggtgcaaaccggtgggaataaggaatttttcaaagaagccgtagacaaacactcccgcaacgccggcgttcttcataaacccggtcagcgcgctaatgccgtgggtcataaacggccaaatccaggtaaaagcaatggcgtagcagataatgaccggcgtcatggcgaccagcgtcagcttcgccccgccatacatcgatagcgcgccgggcagctcaatattggagactttattatgtacccaggcaatggtgcagccaagaatgattccgaggaatactcccatatcgacgaccacaaagcctaatagctgcgtttgcccggtaccgtaatattcgccgttaattttttccgccaccgcatgagtatgttccagccatgaatggttggcgccgagaaacatgataaaacacatcaccgagacaagcgcgacctccgtttttttatcttttgccaggccgtaacttattcccacgcaaaacaataatccgaggttaccgaataatggccagaaggtatcgccaagcagttgccctaattgatgaaggaaactggtttcagcaataagagtcgggttagttaagacggaactgagagccagaattaatccaatgaccggcaagaacaatactgcgccgatcatggccctggagaatttttgcatattctccagaatacgttgacgtattacagacatggttgttccttttatttttgtaggtacaggggatcattatttttatcaacttccagtattttggttatagcaattctgatttttgaaaggaacctgttgcgggaaataggcacagatagccgcaatttgcatacaggtttcagggagggggattagccctcttccgccgggaagagggcaagaggaaaatggctacggtgttacgggaaccggcgcggcgggcgcgttgctaacctcgccgttgcgcatcacctgcgccacctgctgcttgtccatattggtggcgctgagctggccgttgacactcggtttcagcggcgcattggcctgcacgctaccgttcgcggttagctggaaattgccgtcgccgctaatcggcagcgcaggccagccccaggcctgcagaatattcagcggcacgccgcggccgttcaagctcagattaacctggcgttgcggcaattgtgacacggcggcggtcgcctgcagaataccgcgctcggtaaaggcgctcagttcgctgatgttgaccgtagaagcgttcgcgttcagcttcagcgacgggcggcgtacgtcgatgcggttgaaggtcgcggcggcggcattgagggtggcgctgccattccacacgccccactggccatctttcaccagctgtaattcgccgccgtaaccgtccagcgcggtgatctgccatgggaaggccgggtcgatatcgataatcagatttcggctggcgctgaatttcttcagcgtcaggctttgcagccagcccggcatcggctccatccacagctgtttccagttggacggcagcgtatattccagcccggcgaagacggcatcgtcgagcaccagcgcattaccggcgcgcagccagttgccggaggtacgcaccatgccgccctcccaacgggagctgaactggcgtagcgcaatgccctgcggcgagaattcggcattaacgatgggatcgaggaaattcagtgaaccgtagataaactcgctggcgttcatcgatagcgtcccgtcgtcgctttgccagccgttatggctcaaagtcagattgcgcaagttaaggtcgaggtcggtaaccgcccagcctggcccctgcaaacgagcatcggtcacatccagccggccaatctgcagcgacggcaccgaggtgagcggcgcaaggaactcattcagcggtttggcgctctgcagacgaatttcattcaggcgcaggttatcaaccagccagctaccgtcggcgtggcgtttggcgttgccggtcagcgtgccgcgcgcgatatcggcgccaagggtgcttagggtcacctcgccgttatcaattgccccctggatcaggacgttgctggcttcgacgccgttaatattcatcgagcccgcgctcatctgaatttgcgcttttctgcccagcacgtcgcccgcttccggctgccacggcatcacgccgccggtcacccgctgcgcgctcaggttccactcgctgtccgggctgttaaaggccatatcgcgtagctgcaggcggtcggcggcaaacggcatcgaggcggaagccggagaaagattcagcgtgccgttgctgagaacgatttcatcagcgtgcagcgggtcgttgaactggcgggtgctaaatccgatatccaccgttctggcgaccagcgtcggcggcttgccgtcgcggccaaaggtgacattttgcaactgcagatgcagtggggaagagaagtcatgcgccatcttatcgaaggcgattttccagccggtgctttcgcttaaccaactgctcgcctggcgcgcccccagcgggtttgcagcgcaaagtaagcggcgacgataacgaccagcagggcgatcagcagccagaggatcagctttccaagaaatttcatgatcttccatcctgataagtacacatcaccgtgttatgcacgatttatgcgcaatcctcaaggcgggaatagtgaaatgagatgaagtgaggtgaagagatgttacagccgccgcgctccctggtcgccgtggcgataccggggagcgcaacttcaatgcgttagttcttctcaggcgggaagattaaattcagaacaatcgccgtgataccgccagcagcaataccggatgagagcaggtttttcagccagtccggcgcgaattgcaggattagcggctgctgcgatacgccgagacccaccgccagagagagggcgataatcagaatggcgcggcgattcagcggctcgcgggagacgatgcgcacgccggatgcggcaatggtaccgaacatcaccagcgtcgcgccgccaagtaccggctcaggaatatgctgcacaaagccgcttaccgccgggaacaggccgagcacaattagcatcagcgccaccacaaagcccacatagcggctggcgacgccggtcagctggatcacgccgttgttctggccgaagcaggagttcgggaaggtattgaaaactgcggaaacaaatgagttcaggccgttcgccagtacgccgcctttcagacgtttcatatacagcgggccggagaccggttgttcagaaacgtcggaggtggcggtgatatcgccaatcgtttccagcgaggtgatcataaagaccagcatcagcggcagcagcaggctccagtcgatgcccaggccgtaatagagcggcgtagggatagtgatcaggctgctgttggtaggcgcggtgtaagccggcagcatatcgaggaaccacgccgccagataaccggcagccatcgcgatcaccagcgaggcgatgcgcaggtacgggttgcgctggcggttgaggataataatcagcgccagcacgatgcccgccagcagcaggtttttcggcgcgccgaaggtgtggtcggccatcgccgcatagccgccgccgatagaagtcaggccaacctgaatgagcgacaggccgataatcatcaccaccacgccggagaccagcggcgtaataatgcggcgcgccagatgcagaacccgcgagaggaccatttcggtgcagctcgccagcatcagggtgccgaacagcgcggccatcatcgtcggcacgtcggcgccgccggttttcagcgcggttccgcccataatcagcggggcgacgaagttgaagctggtgccctggatggagagcaggccggagccaactggtccccaggctttaatctggataatggatgccacgccggaggcgaacagcgacatgctgatgatgtgttgcgtatcttcggccgggaggccgagcgcctgacagataagcagcgccggggtgatgaccgcgacaaacatcgccagcaggtgctggaatgcggcaaacagcgtttgcggaagcggcggacggtcttcgaggcgatagattaattcgctggctggtttatgcgcaaccggttgcgcattttctgactctgcggtcgtaacggacatcacaaacaatcccaaggtggcaaagcgggaattttatcggactgtagaccaaaagcaaacgtttgccacgatttggcgcaaaaaatatcctcactgaatagatgtaacaaattaattaacattttgtatgcttgatcgcatcaacgctaatacaaaatatctttttctgtcattttttgcgcacttctgcttaaaatcgctcttcgactcctcaagatgagaagtaatcgacaccgggaataccgtcgcgtgtgaatgaatcatgcgcccataaggagctcttttttatgttgcatctcgataccttatcgacgctcgttgccgcaaccatggtgttgcttttagggcgaaagctcgttcagaacgtcccattcctcaaaaaatataccattcctgaacccgtcgccggcggcctgctggtggcgctggcgctgctggttttgaaaaaaagcatggatatcgaaatcgatttcgatatgagcctgaaggacccgctgatgctggcgttcttcgccactatcggccttaacgctaacctggccagtctgcgggcgggcggcaaagtgcttggcactttcctgattgtggtggtaggcctgctgctgctgcagaacgctctcggcatcggcatggcgaagctgctggggttggatccgctgatgggtctgctggccggttctatcacgctttccggcggccacggcaccggggcggcgtggagtaaattattcgttgagcgttacggttttgccaacgccaccgaggtcgccatggcttgcgcaaccttcggtctggtgctcggcggcctgatcggcgggccggtggcgcgttatctggtgaaacactcttcctcgccggacggtacaccggacgaccagctggcgccgacggcgtttgagaagccggatatgggccgcatgatcacctcgctggtgctgattgaaagtattgcgttaatcgctatctgcctgaccgtagggaaggtggttgcgcaactgctggcgggtaccgtgtttgaattaccgaccttcgtctgcgtgctgtttatcggcgtgatcctcagcaacggcctggcgctggctgggctgtatcgcgtgtttgaccgtgcggtatcggtactgggcaacgtcagtctgtcgctgttcctcgcgatggcgctgatgagcctcaagctgtgggaactggcgtcgctggcgctgccgatgattattattctggcggtacaggcggtggcgatggcgctgtatgcggtgtttgtgacttaccggatgatgggcaagaactatgatgccgccgtgctggcagccggtcattgcgggttcgggcttggcgcgacgccgacggcgattgccaatatgcaggcgattaccgaccgttttggcccgtcgcatatggctttcctggtggtgccgatggtgggggcgttctttatcgacatcgtcaacgcgctggtgattaagctgtacctgctgctgccgatatttggctgatacaaaaatgccggagttaacctccggcatttttttgcgcttttcaggtacgggtaacggcatggttggccggataagacgccctggcgtcgccatccggcgcgataccgaggtttactcgtcgtgctcttcccacgctaacgcgcgtttcaccgctttcttccagccgctgtagcggaaattacgctcggtggtttcaatacccgggcggaactcacgttcaatcaccgctttctcctgcagctcgtcgagattttgccagaagccgaccgccagacctgccagataggcggcgcccagcgccgtgacttcacgcacttccgggcgttcgacgcgggtgccgagaatgtcggactggaactgcatcaggaagttgttggcgaccgcgccgccgtccacgcgcagggcgtgcagacggataccggagtcggcctgcatcgcttccagaacgtcgcgcgtctgataggcgatagattccagcgtggcgcggataatatggttggcgttcaccccgcgggtcaggccgaaaatcgcgccgcgcgcatacggatcccagtatggcgcgccaagaccggtaaaggccggcaccacatatacgccgttggtgtccttcaccttagtggcgaagtattcagaatcgaaagcatcgttgatgagtttcatttcatcacgcagccactgaatcgacgccccggccataaacaccgcgccttccagcgcgtagttcacttcgccggtcgggccgcaggcgatagtggtcagcaggccgtgggttgaagtcactgccttttcaccggtgttcattaacatgaagcagccggtaccgtaggtgtttttcgccatcccttctttcacacacagctggccaaacagcgccgcctgctggtcgccggcgatgccggagataggaatacgggtgccgcctttaccgccgatgttggtctggccgtaaacttcagaagacttacgtacttccggcaacatggcgcgcgggatatccagcgcgtcgagcattttgtcgtcccagtccagttcatggatgttgaacaacatggtacgcgaggcgttagtgtagtcggtgacgtgcacgcgcccctgagtcattttccagataagccaggtatcaacggtaccgaacagtagttcgccgcgcttcgcgcgctcgcgggcgccttcgacatggtcaaggatccacttcactttggtgccggagaagtacgggtccaccaccaggccggtggctttgcggatgtactcttccatgccgtcgcgcttgagttgctcgcagatatccgcggtgcggcggcattgccagacgatggcgttgtaaataggcttaccggtctcacgctcccatacgatggcggtttcacgctggttggtgatgccgatggcggcgatttcgtcggagttgatatccgctttcgccaacacttcgaccagcgtagagctctgcgaggcccaaatctccatcgggtcgtgctcaacccagcctggcttcggataaatttgttcgaattcacgctgtgacacgctgacgatattggcgtcgtgatccatcacgacggcgcgggagctggtagtgccctggtcgagcgcaacgatatattttttctcggtcataattggtgtcccgtagtcagattacagcgaagctttttgttgcgacgcggaagaagcggattctttttcttcctcgacgcaggtgtcgcaaggcagatggcggccaatgaatttgcggtagctgaatgcgcccagcgccgcgccgaccaccggtgcgcacagcggcaccaggaaataaggaatatctttgccgccggtgaaggcgacgttgccccagcctgccagccaggcgaaggctttcggtccgatatcacgcgccgggttcatcgcgaagccggtcagcggacccatagaagcaccgataacggcaatcagcaggccaatcagcagcggcgccagcgggccgcgcggcacgccgttgccgtcgtcggtcagcgctaaaatcacgcccatcaggatagcggtaatcaccatttctaccgcgaaggcctgcacaaaattgatatgcgggttagggtaggtcgagaagataccggcgagctcaaggctttccacgctgccgcgtaccatattgtgggtgtgttcgaaatcgaagaaaagattgtaataaagcccgtaaactaatgccgcagcgcaaaaggcgccggcgaattgcgaaataataaaaggaacaactttgcgcccatcaaagcaggcgaataaccataaggcgatggtgaccgccggattaaggtgcgcaccggatacgcccgcggtcaggtagatagccatagccacccccagaccccagatgatgctgatttcccactgaccgaagctggctcccgcgactttgagcgcagctacgcacccaacgccgaaaaagatcaacaacccggtaccgagaaactctgcgatgcactggccttttaatgttgatgtctggctcataatcggatcctgaagcgaagtgattattgtaagtatgttggtcgcggacgaccacggtgccttgtaggcatagtgttaatttatcgttaacgagcataaacgagaaatatcgaaatttaaatttgtgtccctcgtcaagaaaatgagcgttttcgcgccataaacgcgtgttgcggcacatttacccatctttttctgcgtattttgttatctcattgattaacaatcgccagagaagttcagggcaattgccgcgaacgcaccaggtaaagactgaaaagtgttgcaaaccgcaatctgcgcgggttgtcgctggacaggtgaggcggggattcatacaatcgacgacaacaccgctattgtgcgctaattcgttaaggcgggaccgcgtatacgaaacacgagtttctatcaacgccttgcaagatcaggagaggtatgacgatgtcattagaagtgtttgagaaattagaatctaaagttcagcaggcgattgataccatcactctgttgcagatggaaatcgaagagctgaaagaaaagaacaccacgctggcgcaggaagtgcagagcgcgcagcacggccgcgaagagctggagcgtgaaaatagccagctgagagaacaacagcagggctggcaggatcgtctgcaggcgctgctgggccgcatggaagaagtctaatcgcttcccgccccttcccgcccgggaaggggttttctctatcccccgctttatatctccaggttatagccaatctttttttattctttaatcattgattcgctttctggcacgcttagttcatcacaacacgacataaagagagcggtgcgatgaataagtggggcgtagggttaactctgttgctggcatccgccagcgtgctggcaaaagattatcagctgttgaacgtctcgtacgatccgacgcgcgagctgtacgagcagtacaataaagcgtttagcgcgcactggaagcaggaaaccggcgataacgtggtgattcgccagtcgcacggcggctccggcaaacaggcgacgtcggttatcaacgggattgaagcggatgtcgtcaccctggcgctggcctacgatgtagacgctattgccgaacgcggtcgtatcgataaaaactggctgaagcgcctgccggataactccgcgccgtatacctcaaccatcgtgttcctcgtccgtaagggcaatccaaaacagatccatgactggaacgatctgattaaaccaggcgtatcggtcatcaccccgaacccgaaaagctccggcggcgcccgctggaactatctggcggcatggggttatgccctgcatcagaatcacggcgatcaggctaaagcgcaggagttcgtgaaggcgctgtacaaaaacgtggaagtactggattccggcgcgcgcggttccactaacaccttcgtagaacgcgggatcggcgatgtgctgattgcctgggagaacgaagcgctgctggcgacaaaagagctgggcaaggacaagtttgaaatcgtgacgccgagcgagtccattctggccgagccgacggtttccgtcgtcgataaagtggtggataagaaaggcactcgtcaggtggcggaagcgtacctgaagtatctctactcgccggaaggccaggagattgcggcgaagaacttctatcgtccgcgcgatcctgatgtggcgaagaaatatgccaacgagttcccgaaactgaagctgtttaccatcgatcaggagttcggcggctggacgaaagcgcagaaggagcacttctccaacggcggtaccttcgaccagattagccagcgttaatcctcttgtccctgcttgcgctacgcttagcagggctacagttctccgccctttggtagcccgggtaaggcgtcagccgccacccgggataactccccgcccgtcatctgtttttatttagtcatcaaattacgttactcttccggttcaggcttaacagggaacaataatgagaagagtaagataccttttatgggcgctgctggtggttattctggcggcgctggctggcggctactattggctgcattccggtaacccgaacgcgttacgtaatattgtcctgcagcagtgcgttcccaatcagcagcaacatcaaaacccgtcgccgtgcgcggaagtgaatctgaaaggcggctacgtgttgtttaaagatcgcaacggcccgctgcaatatctgctgatgccgacctaccgtattaacggtaccgaaagtccgctgctgttggatccgctgacgccgaatttcttctggcaggcgtggcagggacgcgaaattatgagccaacgccgcggcgcgccgattgatgataacgcggtatcgctggcgattaactcgcgcagcgggcgcacgcaaaaccacttccatattcatatctcctgcctgcgtcccgatgtacgcgcgcagttagataatgatgcggcgacaattagcagccgctggctccctttgccgggcggtctgcagggccatgaatatctggcgcgtcgggtaacggaagccgagctggctcagcgcagcccgttcctgatgctggcggaagaggtaccggaagcgcgcgaacatatggggcgttatgcgttagcgatggcgcggcaaagcgacggctcgctggtgctgttggcgacagagcgtaacctgctgactctcaaccgtgcttcggcggaagaaattcaggatcatagctgcgcaattcttaacgcaaaccactagttctggcgtttacctgtctttcctgtcgtcgtattcttgctgaaaaaaacgacaggagacaggcatgtcgctctggctaacccacccgctgttcctcccttcgctgatcgtcggcatcaccattgtgctctgggcgacttcgctgttaccggaatttatcaccgcgctgctgttcttcgcggcggcgatgatgaccaaaatcgctccgccggaggtgatcttcggcggttttgcttcctccgcgttctggttggtgttcagtggctttgtgttggggatcgccatccgtaaaaccggactggcggatagagcggcgcaggcgctgtcggcgcggctcaccgactcctggccgcggatggtcggcagcgtcgtattactgagttatgcgttggcgttcgtgatgccatcaaacatggggcgcatcgcgctgttgatgccgattgtggcggcgatggcccggcgcgccgggatcgccgacggcacgcgcggctggtacggcctggcgctggcggtgggttttggcaccttccagctatccgcgaccattttgcccgcaaacgtgccaaatctggtgatgagcggcgcggcggaaggctcttacgggatccatctgaattatgttccctatttactgctgcatacgccggttctcggttggctgaaaggggcggtgctggtggcgctgatctgctggctgtttcccggcaagccgcatccgccgcgcgagctggcgccgctggcgccaatgagccgtgacgaaaagcgtctggcgtggctgctggcggtggtgttgacgttatgggtgacagagagctggcacggcgtcggcccggcgtggaccgggctggcggcagcggtggtcacgctgctgccgcgagtgggatttatcagcggcgaggagttcgccagcgggggaatatgcgcacctgtatttatgttgccggcattttgggactggcgattaccgttacccaaaccgggattggcggcgcggtgggtaacgcgctgctgcaggtgatgccgctggataaagataatccgttcaccagcttcctggcgctgaccggaattaccagcgcgctgaattttattatgaccgctaacggcgtgccggcgctgtatacgacttttgcgcagagttttgccgacgcgaccggctttccgctgctgagcgtgattatgattcaggtgctgggttattccacgccgctgctgccgtaccaggcgtcgccgatcgtggtggcgatgggattaggtaaagtcccggcgagagcggggatgttgctatgtctggcgctggcggcggtgagctatttgattttgctgccgctggattacgcgtggtatcagctattggggaaattgtagcgataatataaaacccggctcgcgctacgctaagccgggttattactcgtgcgaagttgtcagcaaccccggcagcgtttcaccaccgggaaagcgaattacgcttttttcgccgcttctgcagctttaacgatcaccgcgaaagcgtctgctttcagggaagcgccgccaaccagcgcgccgtcgatgtccggctgggtgaacagctctgcggcgttgccggcgttaacggaaccgccgtactggatgacgacctgctcagcgattttagcgtcagctttagcaatgtggtcacggatgaatttgtgtaccgcctgagcctgcgctggggtagcggatttaccggtaccgatagcccatactggttcgtacgcgataaccacgccttcaaaagcggctgcgccctgagttttcagaaccgcgtcgatctgacgtgcacaaacttcttcagttttgcccgcttcgttttcagcttcggtttcaccgatgcacagaaccggcgtcagaccctgctctttcagtacagcgaatttcttcgcgatcagctcgtcggattctttgtggtaggtacggcgttcggagtggccgatgatgatgtactgtgcgccgatatctttcagcatttcggcggaggtttcaccggtgaatgcgccggacaggttcacgtcaacgttctgcgcgcctaagtggatgtggctaccttctgccgcacgcttagccaggtcgagatacatttccggcggcgcgattgccacagcacagccgcttacgccggccagttcagtacgcaggttagcaaccagttcgtttaccatgtggcggctgccgttcagtttccagttacccatcactaaaggatgtcgcattttaattctccacgctactaagcgaattaaggaatatagccgcccagagggcagcatggtctgtgaaacagtatagagactcgtcactggaaaggctttgctttttgtcatttattgttgtcttccagcgtttcagatagcgccagcttaatcggttcaatggcgaaagttagccctttttccccgtgatctgctactacatagcgcaccgcgccttcggtttcggtgtagtagcgtttgcctttgccggcggtcagcagtttttgcagcttttgctggctctgcagtgggcttagcgtcggcacaaaggcgcgaagaatggcgctcatatactcctgcgctttcgctttcgccgctttttgttccggcccctgaatcggcagccaggttatctgcattgatttaatcttcagcgtgccgcgctccagcgcggtagaggcatacagattctcgttaatcttggtggcggcgcgggtcaggttggctttatcgcggctggaggcgatagaacgaaactcgtttaacggcagtttcggattatcggcattaaatttctcgcggaactcgctgatgctgacatcaaaaatcggcgcgctgggtaaaagataggggcggtggcggcggattccgtttctgcggacaacgccatcgggccgacagataatgctgtcagcccaatcaaacttaagattgcccacttcttcatgcctgtctttcctttttttgcctgccgacgattaaaacgggaaccgtcacgcttgtcaaaaagtgacgccttcagggtaaactacgcgaatgatgatgataaggaataaaacatgaccttacagcagtggttattctcaattaaaggccgtattggccgccgggatttctggatttggatcgttatctgggtgttgaccatgagcgcgctgtttaccctcgcgggcagcaatttgctgagtttgcagaccgcggcgtttattctcgtctgtctgctctggccgacggcggcagtcgtggtgaagcgtctgcacgatcgcgggagatccggcctctgggcgctgctgatgattctggcgtggatgctgctggcgggcaactgggcgatgttgccgcaggtctggcagtggggcgtcgggcgctttgtaccgacgctgattatcgtcatgatgctgatcgacctgggcgcgttcgtcggcacccagggcgaaaataagtttggtaaagagacgcaggatgtccgctggaaagcggaagcctgattaccagtagtgctctgccgtcatatggcccggtcggcgacgtagatgtttggtcatctgccgggtctctttcagcaactgctgggtatcacgcaccatctgcgggttaccgcacagcatcacgtggctggtatcggcggtcatcggcaggccgaccgcctcttccagcgcgccggtttcaatcaggaacggcacccggcccgtcagtgaaccttccgctgtctcgcggctgaccacggtctggatacgcaatttgccggcgtagcgctgctccagctcgcgcatttgcggtaaatagctgaggtcggcggcgtagcgcgctgcatgcaccagcactaagtttttgaagcgatccaggtctttcccttcttccagaatcgacaaataggggccgatggctgtgccggtggcgagcatccacagcgtgtcgcagtccggcacctcttccagcacgaagaaaccggcggcttcgctgactatctgaacgtcgtcgccgggtttcagcgcggccagtcgcgggctgagtttaccctccggaacggtgaccaggtagaactcaagatcgggattgctgggggcgttgacgtaggagtaggcgcgctgcacgcgctcgccgtcaacatccaggcccagtttagcaaactgccctgcggtgaacggctcaacgggcgcgtgaatggtgaggctaaacagtgcatcggtccagttttgcacttttacaactttacctgtaacccagtttgccattgcgtctctcctctcaatctcgtcagtctatcttcaccgcgacgggagaagatttccagcctgaaaaggctggaaagctcgattgatcaaatgttttacaggatgtgttgctggacgtccgggtcttttcggtcgaggtaatgaatcgactgaatacggcggatagtccgcgatttaccgcggattagcagcgtttcggtggtcgccatgttgcccttgcgggtaatgccgtccagcagatcgcctttggtaatcccggtggcggagaagatgacgttatcgctgcgcgccatttcatcaagacgcagcactttacccgcttcgatgcccatggttttgcagcgcgccagttcgttttcgccgatacggcggttctcttcgctgtcgcccttcacgtggtgacgagccagcaggcggccctgcatatcgccgtccagcgcgcggatcaccgccgccgaaaccacgccttccggcgcgccgccgatgccgtacagcacgtcgacttcgctatccggcatacaggtcagaatagaagccgccacgtcgccatcggggatcgcgaacacgcgcacgcccaactgctgcagttgcgcaatgaccgcgtcgtggcggggttttgccagcacggtgacggtcagttcgccgagcggtttgttcaacgcgcgggcgatgttgcgcaggttctcttccagcggcagattgagatcgatggcgcttttcgcgccgggaccgacaatcagcttttccatatacatatccggcgcgttgaggaagcagcctttatcgccaaccgccatcaccgctagcgcgttggcctgacccatggccgtcatgcgggtaccttcaatcggatcgacggcgatatctaccgcgtcgcctttgccggtacccactttttcgccgatatagagcatcggcgcttcatcgatttcgccctcgccgatgacgatggtgccgtcgatattgacgaggttaagcataatgcgcatggcgttaaccgctgcgccgtcggcggtatttttatcgccgcggcccagccatttatagcccgccagcgcggcggcttcggtgacacgcgaaaattcgatggccagttctcgtttcataatccactcgttgtgtagaaaagttgcccgtagcgcggcaagaaggacgcgctacgcgttggaatagcgttcggtttccggcatccagcgctcaatcagcgcctgtgcctgcagcggatagcgttcgtgaatatggcgagcaatgcgctgaacatcggggatcatggcctgatcgcgcagcaagtccgctactttaaactcggcgttgccggtctggcgggtgccgagcagctcgccggggccgcggatttccaggtctttctgggcgatgacgaaaccgtcgttgctgtcgcgcagcacctgcaggcgcttctgcgccgttttggagagcggcgatttatagagtagcacgcagtgggaggcgacggcgccgcgcccgacgcgcccgcgtagctgatgcagctgcgccagacccagacgctccgggttttcaataatcatcaggcttgagttagggacgtcaacgccgacttcaatcaccgtggtggcgaccagcaggtgcatctcgccctgcttgaaggcctgcatcactgcctgtttctccgctggtttcatccgcccgtggacgaggccgatattgagttccggcagcgccagtttgagctcttcccaggtggcttccgccgcctgggcttccagcagatcggactcttcaatcagcgtacagacccaataggcctggcgaccttcctgggtgcaggcgttacgcacgcggtcgataatgtcgctgcggcgcgtgtcagggatagcgacggtcgttaccggggtacggcccggcggcagctcgtcgataaccgaggtatcgagatcggcataagcggtcatcgccagggtgcgtggaatcggcgtagcggtcatgatcagctgatgcggatggaagccctgctgctggcccttttcccacagcgccaggcgttgatgaacgccgaagcggtgctgttcgtcgataattaccagcgccaggccgttaaattgcacctgctcctggaaaatggcgtgggtgccgacaatcatctgcacttcaccgttggcgatggcttcctgctgcgcctggcgcgctttgcctttctgtttgccagccagccagccgacttcaatgcccagcggcgcgaaccagctgcggaaattattggcgtgctgctcggcgagcagttcggtcggcgccatcagcgccacctgtttgccatgggcgatagcgcgcagggcggccagcgcggcgaccagcgttttaccggatccgacgtcgccctgcaccaggcgcatcatcggcacgtccagcgccatatcgcgctcgatctcagcggtaacgcgcgcctgggcgcccgttggtttaaagggcagggaagacagaagctggtttttcagcgtgtcgttggcgctgagcggcagtgcatgatagcgctgggcgccggcgcggagcgccagcatgctgagattatgcgccagtaactcttccaggataagacgttgttgtgccggatgtttaccgctctccagctcgctgagctgtagcgacggcggtgggcgatgcagcgtgcgtagcgcctccggcaggctcatcatcccctgcgccaactccggcggcagcagttcgctaatcgcgcaggtttccagcagctcaagcgcttgatcggtgagtttgcgcagcgtcgcctgcttaatgccttcagtggttgggtagaccggagtcagggtttcctgcagctccggggtactcatatcaccctgtacgcgatattccggatggatcatctcggcgccaaacttgccgcgtttagcttcgccgtaggccagcacgcgacgaccggtcgccaggctgtttttcatcgctgcgttgaagttgaaaaaacgcatggtcaggatgccggagccatcgctgatctgacaggtcatcatccggcggccgccgaaggtgatattgctgttgagcacttcaccctctacggttgcgtagacgcccggcagcagttcgccgatttgatacaggtgggttcggtcttcatagcgtagcggcaggtgaagtagcaggtcctgaaccgtatgcagaccgattttcgccagtttgctgctctgtgcggcgccaacgccggtcagcgaattgagcgggacggcatctaacaggcggcctgacatcggatttacctcgccgcctgcatcgttgcccaccacgaggcatcggcttcgacttcaccctgctcgttgacgtggggataaggcagacctttttgtttagcgacgcgcgccagcaccggataaccaccttcaaatagcagccgctgctgctcttcaggcggcagcatgctatcggcgcgttggtacattccggcgttctgccgctgacgctgcgcttcgtaaaggatcagcgcggaggcgacggagacgttcagcgactgcaccataccgaccattggaataatgatgtcctggtctgccagcgccagcgcttcctgggtgatgccggttttctcctggcccatcagaatgcaggtcgggcgcgtatagtcgatttcgcgaaaatcgatggctttgtcggaaaggtgcgtcgcgaggatttgcatgccccggccttttaagtggctgacggcatcgccgatagtgcggtgcgtttttacctgcacccagctattgctgccggcggcggcagaggccatggtacgcatgcggctgccaggccagatggcgtgtacttcgtgtacgccgatggcgtctgcagtgcggatgaccgcagagacgttatggggtttatggacctgctccatgcagaccgtcagatcaggctgacgcctggcgagcatctcgcagatacgcgcataacgctgtgaattcattctacttaatccttcgaactgcctcggcgttagctgcactcactcaccccagtcacgtacttcagtaccttcctggggattcgatttttgtaaaagctaatttcggttacgagtgactttaatcacgtccggcatgacgcgaattttgcgcatgatattcgccaggtgcacgcggtcgcgcgcggtcaggcggataaaggcgctgtaaacgcggccatctttttcttccgtattcaggctctgaatattggaagacgcggtgttgattgcggccgtcaggttagccagcgcgccctgatggttgaacatatccaccttaatttcggcgataaattcctgcgcagtttctttatcccattcgaccgccataaacttctcaggctctttctggtagccgcggatgttacgacaggattcatggtggataaccaaccctttgcctgggctgacgtgggcgatgatcggatcccccggaatcggacgacagcacttggcgaaagtaatcagcacgccatcggcgcccttgatcggcagatggccgtgattcgacgcgttggacggcaccggtgcggcagaagcttcgccctgctgcaggtttttcgccaccacgacgctcattgcgttaccgagaccgatttccgccagcagatcgtcaagcgtggccagcttcatgcggtcaagttcgcgctggatgttctcctgcgggatctctgccagcttgcggctgccgcctaacgcgtggttgagcagtcggcggccaaggctgaccgaatcgtcgcgcttaaggttcttcagcagttggcggatcttggcgcgcgcttttgagctgacgacaaagttcagccatgcggcattcgggcgtgcgcccggcgcggtaatgatttcgacagtctggccgctggagagcggctgcgacagcggatagggctgacggtcgacgcgcgcgccgacgcaggcatggccgatatcggtatgcaccgcataggcgaagtccactggcgtggcaccggcaggcagttcgacaatgcgcccttccggggtgaaaacgtaaatctcatccgggaacagatcggatttaacgctctcgataaattcaaatgagctaccggcgctctgctgcagttccagcaggctttgcatccagcgctgagcgcggatttgtgcggtcgtgctgctttcgccgccgtgctctttataagcccagtgcgccgcaacccccatttccgccatctggtccatatcttcggtacggatttgtacctcgaccgggacgccgtgggggccaatcatcgaggtatgcaaagactgatagccgttcgcttttggaatagcgatgtaatctttgaaacgaccgggacgcggcttgtagaggctgtgcatttggcccagcacgcgatagcaggtatcgggatcgtgaacgataacgcggaaggcgtaaatatccatgatcgagtgaaaacgctgctctttaagcaccattttgcagtaaatggagtacagatgcttttcgcgaccgctaacgcggcaggggattcccgcttcctgtaaacgcccttcgatctcagagaggattttctgaatcatctcttttcggttgccgcgcgccgctttgaccacttctttaatgacgcggtagcggttagggtacagcgcttcaaagcccagctcttcgagctcggttttgatgtgatggatacctagacggtgcgccagcgggctataaatttccagcgtttcgcgggcgatgcggcggcgtttatccgggcgtagcgagcccagggtgcgcatgttgtgggtgcggtcggcaagcttgataaggatgacgcgaatatcctgcaccatcgccatgatcattttgcggaagttttcggcctgtgcctctttcttatcgcggaacttgagcttatcaagtttcgacaccccctctaccagttcggcgacgcttttaccaaaaagctgttccatgtcctggtaggttgcaggagtatcttcaatcacatcatgcagcagcgcggccatcagcgtttcgtagtcgagtttcatctcggccagaatgcaggccaccgctaccgggtgcgtgatatagggttcaccgcttgaacgtgtctgaccctcgtgagcgtcacgtgcaacgagatacgcctgccgaaggcgcttgatttgctcttccggcaggtagttttgaatcagctgattcaggctttcaaacagatacaagggcgacccgctgtgtgattaacgacgaccttcagcaatcgcggtaacggcttgtaattcagcggcttcctgctcttgctgttcctggcgctcacgtacgtcgaggatctggttgttgatcagaccttcttcgatttcgcgcagtgcgataacggtggttttatcgttttcttccggtaccagcggatcctttccgcctacctgcatctgacgagcgcgacgcgcggcgaccagtaccaggtcaaaacggttaccaattttctctacagcgtcctgaacagttacgcgtgccatacttaaaatgctccacaggtgaagaaatgactgggcatgatactgaatgtgggttcagtctgccaatagtttggtgattaaagcgccatgtcgctgcttttggcggctcatgcgcagacgttcagcgcggataatgtttttcaaatcgcctaaagcggtatcaaaatcatcattcacaataaggtaatcatattccgcgtaatggctcatttctgcaactgcctgcgccatacgttttgcgatgacttcttcgctgtcctggccgcggccgcgcaggcggcggtcaagctcgtcttttgatggcggcagaataaagatactgcgcgcgccgggcattttattacggatttgctgggcgccctgccagtcgatatcaagaaaaacatcaacaccggtcgccagaacctgctcgatagcttcacgagaggtgccgtaataattgccaaaaacctcagcgtgctcaaggaaagcgtcttcgctaatcatcgacctgaatttatcgtgatcgacaaagaaatagtgttcaccgtgaacttcacccgggcgcggatcgcgcgtggtatgcgaaacagaaacctgggagtcgtacaacggttgggttttcaataaagcctgaatcaggctggatttacccgcgccgctaggggcggaaacaatataaagcgtgccttgagccatgagtgtcttttgtatgtgattgtcgaaagagatgctacatacgagcctattatacacgccgccgccgcgtgaggcagtcattgtcacactttttgccgctgtttctttcattttgcctgccgctttcctgatttcttaagcagttgcagcaacaaggcgtaaatcctggaaagctgctcgcagcgtaatgatttgcctgtcgccgcggcttcggtctttagcgcacgatgccgcaaggtagaacaaggaggtaaaggcatgtgcagatggctgatagcggcagcgttatggatggcggcggcaatggcaatggcggcctgcccggtgtggtctttgcaacaatccggacaggaaatagatcgcctgagccagcagattgccgactggaaagcggcctactggcagcagggcagtagcgaggtcagcgacgaggtctacgacatgctatctgcccggttggcgcagtggcggcgctgcttcggtcaggagacgcctgaagacgagctgccgccgccgcgcggagaagtcaaacatcccatcgcgcataccggggtgcgtaaactgcccgatgccgcgagcgtcggccgctggatgcgcgagaaacccaatctgtgggtacagccgaaagtcgacggtgtggcggtgacgctggtttatcgcgggggtaggttaatacaggcgattagccgcggcgacggtctggcgggggaagactggacggcaaaagtgcgccagatccccggcgtaccgcaaactaccgcaggagcgctggcaaatagcgtgctacagggcgagatttttcagctgcaagaggggcatatacaaaaacaggcgggcggtatgaactcacgggcgaaagtcgccgggatactgatgcgcaaagcgccatcggcgatgctgaacacgctgggggtgtttatctgggcctggcccgacggtccggcccggatgtccacccgtctggcgctgcttgccgacggtgggtttcctctggcgcagcgctattcccattcggtgaaagactggcaggagaccgccgtctggcgcgagcgatggttcacctcgccgctgccctttgtcaccgatggcattgtgatccgtgcagaaaaagaacctgccgggagcagttggattccagggcaggggcactggctggcggcctggaaatatcagccgttttcgcaggtggcggaagtgaccacaatccagttcactgtcgggcgcagcggcaagatagccgttgtggcgcatctacaaccgataaagctggacgataagctggtgcggcgggtcaatgtcggttcggtggcccgctggcggcagttagacattgtcgccggggaccaggtactgataagcctggccggacaggggatcccgcgtctggatagcgtggtctggcgggccagccagcgagatgcgccacagttgccttcgcctcgctttcattccttaacctgttattttgcgacgaccgaatgtgccgggcagttgctctcccggctggtctggctatcgtctaagccggttctggatattgcgggcgcaggagaggcgctttggcgcacgctaatggacgatcgccgcatgacacatcttttctcatggctggccttgacgcctgaacaactacagagcgtgccaggcattaccagcaagcgtggcctgcggttgtggcatcagttcaatttgacccgcgagcagccgtttattcgttgggtgctggcgctaggggtaccgatacctcaggccgcgcaggcgagcgttgcggcagaaaactggcagcaactgcgggaacgcaatgagtctcagtggcggcgattaccgggagtggggcaggaaagggcgcgccagctggtcacctttttgcaaaacccggatattgccgcgctggcgcagtggctcagcgggcaacgtattccgggattctgaggaatcaatgagcgtcgtgcttgtagtagaagaccggcaggccgagcttccagcgcagggcgagcatacgcgcggtaaagccgaagagcagcgtggcgatgaccactacgtcatggctgctgacgtagtgctgcaacgcgatataaagcaccgcggcggcaaaagagatgcccgcgtacagttctttctgaaacaccagcgggatacgcttacagaacatatcgcgcagcacgccgccaaagacgccggtgatcacggcggcaatagacgcgattatcggcccttcacccatatccagcgcgatttgcgcgccgataatcgagaacacgatcaggcccagggcatccagcaccaggaacaggcggcgcaggtgcggcatcaccggcgcagcgatggtggtgaggacggcggcaaccgccacaataatgacgtattccgggtgcttcacccaaccgagcggataatggccgagcaggatatcccgtacagaacccccaccgagcgcggtggcagtggcgataataatcaccccaaaagtgtccatccggcgacgcccggccgctaaggcgccggtcatcgcttccgccgtaataccaatcagataaagaacatgaagcagcataaatcccccacaatgatgggcaaagggtagcgatttgtgcggcagatcacgattgagtttttctaaagtgagctggttttcatgaaaaaagctaatgctgaatgattgatatggtcaatcactgtggggaatttggcttttgcttttcaaaaatgaataagaaaaagtaatgctggcccgcgaggcaggccagcaggggaagatattactcgatattctgaatctgctcgcgcatctgctcgattagcaccttcagctcaatcgctgaattggtcacttcggcattgatggatttggaggccagagtgttcgactcgcggttgaactcctgcatcatgaagtcgaggcggcgacccacggcttctttcttcttcagaatgttgtaggtctctttaacgtgcgcttccaggcgatcgagctcttcggcgacgtcgatacgctgcgccatcaacaccagttcttgctcgaggcggttgttttccagctgcacttcggcgtcttcaagcttggcgaccaggcgctcgcgctgccactgcagaatttccggcatatgggcgcggactttgctgacttcggcgctgacgccttccaggcgttgttcgattagcgctttcagtgcctggccttcggtttcgcgagcaacgataaaatcatccagcgcgccgttcagggcgttgaggatttcagcggcaatcgcatcgagatcctgctcttgcgccgccatcacgccaggccagcgcaggatatcaaccgggttgatttcgccttcatcgctctgcatttttacccagttagcggcgtttactagctgcttcgccaggttctcattgaggatcagctcgccctgggcgctgggatcctgttcaaaacgtagggtgcattcgattttcccgcgagtcagacgcgtgcggatacgctcgcgaaccacgggttccaggctccggaactgctccggcaggcggaagtaggtttccagatagcgttggtttaccgagcgcagttcccacgcggcgctaccccagtcacccttgatttcacgccgggcataggcggtcatactgcggatcatagacgttcctgttttttaaggagagtggggtggattatagctttcgaggccctttcaggataggaataagcgctcattatccgcatccgcccggatgtgctgtcgcgatgcaacttgactgaatttgtgtataatgcgcagccacattcgtttcaagccggagagtaatcatgcgtccagcaggccgtagcgctaatcaggtgcgtccagtaaccctgacccgtaactatacaaaacatgctgaaggctccgtgctggtcgaatttggcgacaccaaagtgctgtgtactgcctccatcgatgaaggcgtgccgcgcttcctgaaaggtcagggccagggctggatcaccgccgaatatggcatgctgccgcgctccactcatacccgtaacgctcgcgaagccgctaaaggcaaacagggcggccgcactatggaaattcagcgtttgattgcccgcgcgctgcgcgccgcggtggatctgaaagcgctgggcgagttcaccattacgctcgattgcgatgtgctgcaggccgatggcggtacccgtactgcgtccattaccggcgcctgcgttgcgctggccgatgcgctgaacaagctggttgccgcaggtaaactgaaaacgaacccgatgaagggaatggtggctgccgtttccgtgggtatcgttaatggcgaagccatttgcgatctggagtacgtggaagattccgccgcggaaaccgatatgaatgtggtaatgaccgaagacggtcgcatcattgaggtgcagggcacggcggaaggcgagccgttcacccatgaagaacttctcactctcctggcgttagcgcgagggggaatcgaatccattattgcgacgcagaaagcggcgttagaaaattaatgattaaggcgactgagaagtcgccttttttttgcgctttatccctcattacacctgcgaaggatagggcgcgtagtccgacaatgatgacagtactaaaaggagcgaatccatgaagccgtatcagcgccagtttattgagtttgcgcttagcaagcaggttcttaagtttggcgaatttacgctgaaatccgggcgtaagagcccctatttcttcaacgccggcctgtttaataccgggcgcgatctggctctgctgggccgtttctacgccgaggcgctggtggattccgggatcgagttcgacctgctgttcggcccggcctataaaggcatccctatcgccaccaccaccgccgtcgcgctggctgagcatcatgaccgtgacctgccgtactgcttcaaccgtaaagaagcgaagacccacggtgaaggcggcaacctggtcggtagcccgctacagggccgcgtgatgctggtggacgacgtgattaccgccggtaccgcaattcgtgaatcaatggaaattattcaggctaatggcgcggaactggctggcgtactcatttcgcttgatcgccaggaacgcggccgcggcgagctctccgcgattcaggaggtggaacgtgattatggctgcaaagtgatttctatcgtcaccctgaaagatcttatcgcctatctggaagaaaagcctgagatggctgagcatttggcatcggtacgcgcttaccgcgaagcctacggcgtctgaaaatgagcccggcagccagcggctgccggtatagccagagcacgctgagaaggtgaatgcatgagtcatgcagccttgcggctgcatatcaagctttactgcagttgcgccgcgaccagcggccagcgggcatcgaaatcatccgttgggcggtacttgaactcgctacgcacaaaacgcgacagcatgccttcgcaaaatgccagcagctggcttgccagtaacgtctcgtcgagggtgtagccctctccctcacgcattttcttttcacgcatcacctgacgcaattgaacttcgatacgttcaaatagctggttgatacgaccctgcagacggtcctgttcgaacattaaggcgtggccggtgaggatacgcgtcagcccaggattacgctcgccaaacccaagaatcagcaggacaatcaggcgcagacgagccgtggtgtctttttcatctttcaaaatcaaattgatgcgcgtaatcagactgtcttcaatgaattcgatcaggctgtcaaacatgcgggttttactgggaaaatgacggtacaacgccgcttcggaaacaccgacggaggccgccagtttcgctgtggtaatacgttgactaccatcgctggattcaagcatcagcgccagagactgaagtatttcttcgcgacgattccttttcgcagtttgtttttctgccatgttttaaaatacccctgaaaataagcacttgtcaggcaggcatccacaaagcgaccgcaaaccttagtttgcggtgatgttattgcattatgcgctttgggatgcgggttccgtatagccgggcttatttgcgccctgagtggccgaagccgccttcgccgcggtcggtggcatcaaattcttccaccagattaaactccgcctgtaccaccggcacgaagaccatctgcgcgatgcgctcgcctggttcgatagtaaagctctgttggccgcggttccagacggataccatcagctggccctggtagtcggagtcgataagaccgaccaggttgcccagtacgacgccatgtttatggcccaggccagaacgcggcagaatcaccgccgccagagacggatcggcgatatgaatcgcaaggccagtcggcagcaaggtggttgcgcccggcgccagctctacggcgtcgtcaagacaggcacgcaggtcaagtccggctgagccggaggtggcataggttggcaacggaaactgcttgccaacacgcgggtccagaatcttaacgtcgatttttttcatcataacgggtaacgatctcgtcgagtaataattggcccaggaattccttgcgctcaagtggtaagcgcttatccccatcctgccagaaaaggtgtaatgcgttgttatcgctattaaaaccttgatttggctgagaaacatcattggcgcaaatcaggtcgagatttttacgggcacgtttttgccgggcgtattcttccacattatttgtttcggcggcaaatccaacaacgtacgggcgatgattttttagtgcggccaccccggcgacgatgtccgggtttttgaccatttttattgttaattcatcgccttgcttttttattttctcatcggcgacaatcgctgcgcggtagtcggcaacggcggcgcagccgatgaaaatatgctgcttttgcacgccattctgcaccgccgcttccatttccagcgcggtgccaacatcgatgcgttgcacaaacggcggtgtcggcagcgataccgggccgctaaccagcgtgacgttcgcaccgcgttgtgcggcggcggcggcaatcgcgaagcccattttgccggagctatggttggtgatatagcgcaccggatccagcggctcgcgggttgggcccgcggtaatcatgatgttgagatgttgcaaatctttgacaggcgagaaatgctgcgccgccatctccacgatagtgagcggatcgagcatgcggcccggcccaacgtcgccgcaggcctggctgccgctatccgggccccataccaacaggccgcgggcggcaatagtggcaaggttgtcttgggtggcggcggcgcgatacatctgttggttcatcgccggaacgacgaccaccggcgagggcgtagccaggcaaatcgtggagaccaggtcgttcgccatcccggcggcgacgcgggcgattaaatcggcggttgccggcgcaaggataaccagatcggcccacttgcccagttcaatatggcccattgccgcttcggcggccggatccagtaggctatcggagaccggataaccggaaaccgcctgcaggctcaacggagtaataaaggccttggcggcttcggtcatggcgacgcgaacatccgcgccgcgttctcgcagtcggcgcactagttccggcgttttataggcggcgatgccgccgctcacgccgagaacgatctttttaccagccagactcatcatgattttgtcctgttgaaatacaccagaatccgcgcatcttatcacaatcccggtggcatcgtgcgtatgccggacactcactttgcgaggggctacgcaggccttgaaatcaccggtcggcagcgcggaaaggctatgccaggatgggcgaggaacgggaaaggagacagggtaatggatatacaggaatcattgatgccgcgggaaaaaatgctgcgcgacggtattgaaacgttgagcgacgttgagctgctggcgttgtttttgcgtaccggcacgcgtacccaggatgtgctgactttttcacacagcttgttacagcgcttcggttcgctgtacggtctgttatcggcggagatagaacaatttgcagatatcgacggtatcggcattgcgaaatatgcgcaactcaaaggcattgccgaactggcgcgacgctattttagcctgcggatgagagaggaaccgtcgctggtcacgccgctcatgacgcgagaatttttacaaagccagctcgccgatgaagaacgggagatctttatggcgatctttttagataatcagaaccgggtattgaaacatagccgccttttttctggtactcttagccacgtagaggtgcatccgcgagaaattgtacgcgaagcaatcaaagtgaacgccgccgcggtgatccttgcccataatcatccttcaggtagtcctgaaccgagtaagtcggataagttgatgaccgacagggtggttaagtgttgtagattcatggagatacgcgtgcttgatcatctgattattggccgcggcgcgtacgtctcttttgccgaacgtggctggatttagccccgatcatgcgatctatcgggatctttgtctgttcgggacttgagcacaccgccgagtcagcgtatactacgccacctttgagaatctcgggtttggcatttgggcctggcaatcgagagttcaatagaactatgcgatgaccgggctgtaaagcctgacgaggcgccaataccccatacgaagctcgagctaatttgatttttggagaatagacatgtcccgagtctgccaagttactggcaagcgtccggtgaccggtaacaaccgttcccacgcactgaacgcgactaaacgccgtttcctgccgaacctgcactctcaccgtttctgggttgagagcgagaagcgttttgtcaccctgcgcgtatctgctaaaggtatgcgtgtaatcgataaaaaaggcatcgatacagttctgtctgaactgcgtgcccgtggcgaaaagtactaagtacttagaggaaataaatcatggctaaaggtattcgtgagaaaatcaagctggtttcttccgctggtactggtcacttctataccaccacgaagaacaagcgtaccaaaccggaaaaaatggaactgaaaaagtacgatccggttgtacgtcagcacgttatctacaaagaagctaaaatcaaataattttagtctccttgtactaaaaccccgctccggcgggttttttgttttatgcttcatccttcgagctacaggtgcgttggctgcatgcgttcagcctggccgcttgcttcgttaagcctaccggcctctcttcccgctgcctccctgtcacccgaaactgtgtggttaagaggaaaaaaatgcctgaattacctgaagtcgaaaccagccgtcgcggcattgagccgcatctggtgggcgctaacatcctgcatgtcgtagtgcgcaacgggcgcctgcgttggccagtatccgaagagatttaccgcctcagcgacgaaccggtgctgagcgtgcgccgacgcgccaaatacctgctgctggagctgcgtcacggctggatcattattcatcttggtatgtctggcagcctgcgcatcctcagtgaggagcagccggctgaaaaacacgaccacgtcgacctggtgctgagcaacggtaaagtactgcgctataccgatcctcgccgctttggcgcctggttatggactaaagagctggatggtcatccggtgctggcgcatctcggcccggagccgctaagcgatgaattcaacgccgactatctccagcagcgttgcgcgaagaagaaaaccgccattaaaccctggctgatggataacaagctggtggtgggcgtgggcaatatctacgccagcgaatcgctgttttccgccgggatccatcccgatcggctggcctcgtcgctctcgcatcaggaatgcgagtggttagtgaagatgattaagctggtgctgctgcgctcgattgagcagggtggaacgacgctgaaggatttcctgcaaagcgacggtaaaccgggatatttcgcccaggaactgcaggtatatggccgcaaaggcgagccgtgccggatctgcggcacgccgattatcgccagcaaacacgctcagcgcgcgaccttttattgccgccagtgtcagaagtagtggagaggattggggattatgcccggccgggtaagctggtagccccgctacgcgcagcacgagcgggggcaggaagcgcctacttcagcttatttaacagcggctgatgtacgttaggcggcaggaagtgggagacgtcgccctggtggcgcgccacttccttaaccagcgatgaagagataaacgaccactctttgcacggcatcaggaacacgctttccagcgtgggcatcagatggcggttcatgtgcgccagctgcatttcatattcgaaatccgccactgcccgcaggccgcgaatgagaatattggcctgctgcgcgcgggcgaaattcgccatcaaatcgctaaagccaatcacctcaacgttgaccagatgcgctgttgcctgctccgccagcgcaatgcgttcatcgaggctgaacatcggttttttgctcgggctggcggcgatggccagcaaaaccttatcaaacatgcccgccgcgcgggtaacgatatcgatatggccgttggtgatagggtcaaaggtgcccggatagatcgcttttgtgcccataattacactttctccgagtagccgcggctgagtgcccacagctcggtgtatttattaaacgtgtattgcgcattgactaccgccagcagccaaccctgttttccatccagtacgccgccgcgcagcaacagcgttttgacgaaggcgcccagcgtatggctgaaaatccccgccatcgaggtcttcttgcccttctgatggcgctcaagcgcccaggccgcggcataggcgagctgtttctgctggaagccggaaaaatcgcgacaggtcaggtgcagcagatcgccgctgagcggcaccacttcagctccaaggctatccagagattcatgcaccagattatcgttatagcggtaacgcgcgcgttcgtacaggcgcatcacccgatcgggataccagccgctgtggcgcataaagcgcccgaggaagtagttacgccgggcgatgctatagataacgccgcgctgcggcgcgtccagtaccttgaggatagactctttcaactcaggcgtaacgcgctcgtcggtatcaatcatcagcacccagtcgtgagtggcgtaatcttgcgcgcgctggcgctgaatgccgtagccttgccagtcggtgttgctatagacctgggcgccgaggctacgggccagttcgacggtattgtcggtactgccggagtccagcaccaccacttcatccgcccagcttaccgacgccaggcaatcggcgagcaggtcggcggcgtttttggcgatcatcacgacggagagtcgggtcgacattagtggctccgctgcggcaggtagggttgcaataactgtagcagacgcgacagcgcgccctggttttgatgcagtacttccaccgcgtggcgaccgtaccacagtcgataatcttcgtccgtcagcagggtagaaacctctctgaccagcgagtcggcgtccgtgacggttatcaggccatcgtcctgctgcagcttggcgcagatatctttaaagttgaaggtgtgcggacccattagcaccggaatagcgtgggcggcgggttcgagcgggttgtgtccaccgcgttcaaccaggctgccgccgacgaacgccaggtcggcaatgccgtagagcagcatcaattcgcccatggtatcgccaatcaccacctgagtgctgttagacggaatttcaccggtgctgcgcatggtgaagctcatcccggccttttgcaccatatcgcgagcgtcgccgaagcgttccggatggcgcggcacgaggatcaacagcaggtcggggaaggtttccagcagttttttatgcgcctgcaggatgatttgttcttcaccgtcgtgagtgctggtggctatccacactttacggtgcggcgcccactggcgacgcagggtaacggcgcgggccgccagttccggggtgacggaaatatcgaatttcaggctgccggtcaccgccagttggttacgtttgaggccaagtgcgaggaagcggttgccgtcctcttcattttgcgcggcgataagcgtaatacggcttaacaggcggcgcatgaagccgccgagtttggcatagcctttcgccgaacgctctgacaggcgtgcgttagcgataaccagcgggattttacgtttgtgcagcgcggcgaccatgttcggccacagctcggtttccatcacgatgaccagtttcggctgtacgctgttgaggaaacggttcatggcgcagggtaggtcatacggcagatagacgtgatgaacatctttaccgaaggcagacatcgcgcgctctgagccggttggcgtcatggtggtgacggtgatcggcagtgaaggatagcgatgacgtagcgcgcgtactaacgggatcgccgccagcgtttcaccgacggagacggagtgcagcagaatgccatccggcactaccttgttttgacagaagccataacgttcagcccagcgtttacggtatgccggggccttacggctgcgcagcagcagtcgcagccacaccagcggctgaatgaggtagagtagggtggtataaagcaattccaaactatttatccgttttaggttttttgcgggcaaattctaagcatttaacccgcgtaaagctatctctttggcggaaaccgagggatttcggcctatgcggcgttgagatagcgctttatgcgcaaatagcggcgtcccagacgccagcgtaaacggaacgtgcaggcgttagtccagatcaggcgccagatgccgcgttcgaagaattctttaatgataatatgctttttcgactcatctttcatgcagtcgaaggtatggataatccccaacccttctttggctatctgccagcggcaggcgggaatgtgccgtaccttgtctggatagcgctggttgatggcgctgagcatctcgaggatcttcatataatggcgcgctgagcgcatcagcgtatcgtcgttgtctggcttatgcgacaccgattccgagtgaatgtaatagtcgtaaaattgctcgctggtgtactgcacacgctcggcggccagtaacgcttccgtcgtccagggaatatcctgatggcgcaggcccggctcaaagtggaaatggtgctggttaataaaatcgcggcgatagatgttcaaccaggtgacgtgcaggaacttacgcgagtcgagcgcctgcttcagccagacgtaacccggcaggacgccagtggactgcaggcgttccggcgggaaaatcggatgaatgtcgtcgcggctttcgtacacatagcggccattgcaggtcgcgacatcaagattgcccttttccgccatttccagcagcgtgcggtacatgccgggatagaacttatcgtcaatatccgggaaggcgaggtatttaccgcttgccgccgccataccggtattacgcgccaccgagacgccctgattctcctgctccagcacggtgacgttctgcagcctgtctttccattggtcgataactgccaggctaccgtcggtagaaccatcgttcaccaggatcagctcatagcttgccaactgttgctgttcgaggcattcaaagaattgcgcaaggaatttttcaccgttatacacggcggccacgatgctcaataaaggcgtttgactcataactcattcgatcctggttaaaaaacgacgtcaggcgttgcgcaactgacggtactgttggcaaatcgactctacgctgaatttttccagcgcggcggaatcaatggccggcgggctatggtaaatgctttgcatcgtctgggctagcgcagaactgttgaggtcggcaagaccgcgggacaattcgccgcgaaggatctcgcttaccccgccagggcagcgggtgctggcgaccggcgtattcagcagtagcgcttcaacaatgacgttgccaaacccttcgctgtcggagctgagcgttagcattctcgcatgtttaatccatggtagcgggttgggctgaaagcctttaaacagcacccgatcgccgacctgcaactgctgcgctagttgacgaagccgctgttcctgttccggttttccctgtcccagcagcaccagcggcgcgtcgatgccgctttgcgcgtaggcttcaatcagtcggtcatggcgcttaccgggatggaagcggccaacgtggataatatagtccccttggggaatatcggccggcgcctcagccgccgcgcgaatggcggcgatatcgaacgggttatagatggttttaagctgtgccgggcgcagcgcgaactgctcgaccaaatcctttccaaccgcatcggaaacggtcaccacgttgcgtccctggtatacccgcttgattttctgctgcttcatccagcggtcaaaaccgctgcgatgaccaagataagaggttgagaaaacgccgtgcaggcagaaccaaacgttgcgattctgtaatgcccggctgcgggcgacaatgcgatcggttttgtgaagattcgacagtaccagatcgaagcgcccatgctgttctgcttgtttaatcgcgcgatcaagctgacgcgcgcggcgggagagttccgtcaacttacgccacggtttgcggcagcggtcggcgataacctgataatcgagcccttccggcagcggataatcgcagacgtcgcgcagcgaaaatagcgatacctgttcgccctggctaagaaaatgttccgccagcgtgagcacgactttttccgcgccgccgcccggcaggccgtcgataacaaacaatatgcgcatcgttatttcaccagatcctgatagagagaaagcagctgcgtcgacagtcgcgcgctggtgcaatccataattcgttcgcgggcgcgtgcgccttcagcggagcccagcgcgcgcgtgggcagcgccatcaccgcctgctgtaacgcggcaatatccagcgcgtcgcaaacgtagccgttatcaccctcggtgatgaactccgcgccgccgcagccggtggtggtgataaccggtaggccgcaggccatcgcttccagaattacattcgggaatggatcatacagcgtcggcagcagcagtccgtcggccatctgatagaacggtagcgtttcagactgcatgccgcagaagcgcacgcgttcttcgcagttcagcgattttgccagctgttgatagcggttctgttctttgtctttgccgaccaccaacagataacggtcggtgggggcgatggcgcggattgccgcatccagccctttgcgttcaaagccggaaccgacataaatcaggcagctagctttcagcggtagctgccatttagcgcgtaatgcggcaaaggtttcttcgccaggcggcagaaaccgctggttatcaatagcgttgtagatgacgtggattttgtcagccggcaggccgaagtcttcgatgatttcctgcttgatcatctctgcgttgcaaatcaccccgcgcagatgcgcgtcctgatacatctcgcgctccgcctgcatcacataacggtggtagcggtcggcaaacagcaggcggcttttccaggccggtaaaatgcgcgagcgctgttgcagccagcggcgatgaacgccgtcgccggctcggtacagatcgcaacccggaatacgctcatggctttgcaccagatcgaatgattcactctgccagagcgcgcgcgcggcgttggcgaaaccgcgttcacggctgatgcgcccccatttgcgcgggttacagatgtgaatatgccagtccggtttaaccggcccttgccactcgcgggtgatgacgtttagttccagattagtgctgtcgagggcttccagcgcgcgggagacaaagcgctccgcgccgccgtcggggcgatacttctgccgcaccagagccagcctgaatttactcatgccagtacctttttcgccgccgcgatgaccgcgtcggtagggattaaatcaagatagcgttcttcggtgttggtgttgatgtcgtcaggatcgggcagcgggccgaagtcgccggcccagataacctcgcctttcgcctgccacggccgccagaaggtcagctttgacgggccaaatagcgcgacgagcggcgtacccagggctgccgccatatgcatcggcaccgaatctacgccgataaacaggcgggcgtgatcgataaccgccgccagttggcggagcgtcaactgaccggctaacgagtgcagtcgcgcctgcgggcagccgctgatgatgttctctaccatctgcttttctttggcgtcagggccagaggtgagcaccaccgcgtagccttctgctgatagcgcgttaatcagcgcgctcatgcgcgcttcgcgccagcatttaaagaaccagcgcgaggtcggctgaatcacgatgtagttttcctggaagccgtccggcagcaacgcgcggctggtcgtccagtcagattcgctgtagcccatccgcgccggcgcatcattaatctccagtcccagcggcgccagaatagagagattttgctgtaccgtatgcagctgattgtgctgctgggtagaagcaagcgcggtgtggcagtagcgccagaacggatgacggcgcttagggaaatcgaaaccgatgcgcgtcggcgcaccggttaatttgctgataatcgcgctgggccactggtcggcaaggttgagcaccatgtcgtagcgctgttggcgtagcgagcgaatgagctgccattccatcttgagctgatgccgcttgccctgctttttccaattgcgatcgatcgcgtaaatctggttaatctccggatttgccgccagcatgtcgcgggtctcagcatacagtagtacatcgacgcgagcggcgggatactgctgtttgagcgcgtttacaagcggggtgatcagcaacatgtcgccatggtggcgcagcttaatgaccaagatccgcgccgggttctgctggccggaggagagggtttcaggcgtcatactctgttcttcatccaggataagggttccgattctagggatcgcgtagattgagagaagcgttgtattgctctaccatggaccgatacgtatggcctgaggacgttttcgtgcacaatcccgcatttctcatcacgattgatacagagggtgataacctctggcaaaaacatgacagcatcaccacggagaatgcgcgctatcttccgcgttttcagcagctttgcgaaaagtatggcttcaaaccggtctatttgaccaattatgaaatggccatcgaccctttttatatcgagtttgctaaagatgtcattgcgcgcggcaccgcggaaatcggtatgcatctgcacgcctggaacagcccgccgaccgagccgctgaccgcggatgactggcgtcataagccttatctcatcgagtatagcgatgccgccatgcgtgagaaggtcgactatatgacccatctactggaagataccttccagaccaaaatggtgagccatcgcgccgggcgctgggcgtttgacgagcgctacgcgcggctgctggtggagtacggttatcaggtggattgctcggtgacgccgcgagtgaactggaaaaccgctaagggcgcgccgcagggcgatggcggtacggactaccgacgcttcccgcaacatgcttattttctcgatgaaaatgatatcagtcgcgaagggcattccccgttgctggaagtgccgatgagcattcagtataagcactcggcgtggatgaatagcgtgaagcagggctacgatcgtttgcgcggtaaagttcgttcgccatccgtgcactggctgcgtccaatgggcggcaacgtcgagacgatgaagaaagtcgtagaacaaacattgactcagggtaatgactacgtggaatatatgctgcactcgtcggagtatatgcccggcggcagcccaacctttaagaatgagcaggatatcgagcgtttatatgccgatctggaagcgttctttagttggctggccccgcaggtacgaggaatgtcgttggcagaatattaccagcgtaaaatcactcagcgataaaaacagcccaaggtaccggatgcgtatccttaaacaattaacgcggaagaaaaatgcttttttccgcgatattaaatttaatttaattaaccatcgttacagaaataaacccgagcgcgcaccattcgatccatctttgattcgtcatgttttattattacgccttgacgataaggttggcgatatggtggtaaccaccgggtgcgccaggctacttgccgatagaggatttaaagtttcggtattgaccggaccaacatgccaaaaaatattagcaggcttagagtttcttcagaaagtatatttatatcaaccacggatgtcgttaacacagttaaaagcggcaggttttgacgctgtcgttgattttgatgatgtgaaaagctacgagcgatttaaattactttctgaattgcgtttgccctgcgtgattggttttaacaaagagcaatacaaactctacgatcactccattaactttttagatgctaatagtcatatttcgcagcgttataagcaggtagtgaaactctttggcgggccagatgagcattaccgctattatttgcctggctgtttgaaagaaagagaaaaggttagcgaactgctggccaaagctggagagacgcaactgtgtgtcgcgataaatccatttacagcctcaacagataaggatttttgtcgccatcaggtagaagcgctcgttgaacgcctgcataaccttccttatcgcgtaagtattgtgatggtaggacgcagcgaaaaaatacgtcagcttgaactggatatggttctttatctgactgatagcaatattaattcggcggttgaagtagtacgccactgcgatcttgtgatcactcctgatacctcgattgtgcatatcgcgcgagcatttgataagccaatggtggcggtgtacaacaagcgcaagcttaaggataccggattgccaggctatcttatctgggcgccagggtatgaaaaagcgcggcagattgtctgtgaagaaaaaaatgtcgcagatatgaaaatagaagcgctctggccggagatcaaagcgctggccgatcgactcgtcgccgcgcggaaatagaaaaaggggccagttggccctttttctagcgtttcttcagcacacccttactgagcgcaatccctagcggtagccagaaaagtacccatgtctcacgtggattactgacaataaacatcccctgggaagccataaatatcagcgcatacagcatgatggccagactatagcgactgtcgtcatggcgcttacgccaggcttgatgtaaaccgcagacgatcactgccagcaacagcagtaaaccaataatcccgcccttcagcagtgaaccgagataaacgctatgcgtggtggtgatgtgctcaccgctgtagttgatgaaattcagttcatagccgaaacctcgtcccagccacggctggtcagcgatttccatcaacgtatgatgccagatgctcaggcgtagcccgctttgcgttcccaactcttcaaaacgggtaagcagcatgtcgcccactggcgtcaggcaaagtactaatccgatcagtacaagcagtgcgccaataataagcaaattacgccgcgtgaagagatgtagatgcagagtgcaacaaatagcgattgccagtgagatcaatggcccacgactttgggttaacaacatcatcaccaacatgatgataattggaatatataaccagtggttcgatttttctttcaataacataccgctgatcaaaagaccgataccgcagtagcctgccaaatctatcacgttagtcggccctgggttttctggcgatacagcccgctcggtcaataccagagtatgatcaatagccagggtccagattgaaagtacggtgacgccggcaacaatagacagcaacgtaagccgtcgggtttgcgagctacccaggagcgtcgacatcagcagaaggtaaaaaatcagataaacgccgtgtgttagcggtgagtcgatatgctgcggcgtatgccccagatattgctgagggagaagtagacgaagaacgctaccaacaccccccatgtttgccactgttcacgcaaaacttcagccagcgcctgccggttatcctggcgcagcagtgacaacagcagtaataaaatagacaaatgcagcaggttattcgtgcgggtggacatgcaaaaaatagcgctaaaaaatagaaataaagggaaaacaaccgagtaaccctgcttcgcaagattacttatttttgaagtactcattaaacgaaaccttttcgaagatagtttctggaatagcgctttctggcgaaaaattaatgacctggatctgctcttgttgcagtacgttagccgcaagtgcaaaagacggcataacaagattttctacttttgttgccagataagaaggtaattggttttgttgcgtttcatagaagcgcggctggctgaaattggtcatatccagaccacttatcagaatcgttttgaaacccagccaggccagtatttgcaaagcccagtagacgacggtgccggcatcaaaaattccctgtcgaatatcggtactaaaacacacctcgggccgttggggatcgaagcgtagggtatcgacatgttgatacgcttgttgaatcgcatgactcgcgattttgggctggtaaatcttataacagccatcctcgataagggctaaacggcaatgcaactcatcagcgtggcgatcgagaattttggcgatgccgtgcatggtggtgaacaaaagaatgccgctttggcggacgatatggcgaataatctcgggcttcttatcgaaaaactccatatcgacaatggtatagagcgagaatgtgactttgtccgacagatgccatgcgccgttaacgcccatcactggaatgtgttttggcagcagggagaaatcaatgttgcgcgttgaagggccggttgctgtcagcagcacttccccctgcatgctattgcgcagcgaggttaaatcgaccagcggtaccgttttgcctttgtactgtaaagtacagatttcgccgctcgccgcccggcggatttttacccacggccacagattctcattgtggcgataggcgcgcgggcgggtatagcgataaatttgcttaaacagcgatcccattacaccagtccctgtgcttgcaacagttgctgaacatgctcagcggtaatatcgctggtgctgttgccgtttggcggccggacgatatgctgatttttaccatatccgccaatcagtcccggatcggttgggccatagagcgtgaaattgggtttatcgagcgcggcggtcaaatggctcaggccagtatcgacggaaaccacgccgcgtgcgctggccagaatctgcgcaacctgctcaagactcattcgcggtaacacgtcgacgttatcgcgcccttccgccagccgttttgcccgcgcctcttcatgcggcgcgccccacggcagtttgatccgtatggcgctacctgccagcagatcgagaagctcttgccagcgcgcttccggccagtgtttatcatcgcgggtggtggcgtgcagaaagaccagatacggctctgctaccggcgagtcggggcgaataaagtggcgcgcgatggcgtaatcaccctgtgtttgtggccgggcatagcccaggctcttagcgaatagttcccgcgtacgctctaccgcgtgctgctggacagcaatatggtggcgacggttataaaacaggcttgccagcggctcgcgggcggactgccagtccatgccatgtttgacgccgtgcgccagacgcgtcaccagcgcggcgcttttcaccagcccttgagcatcgataatggcatcgtagttgacggcctttacggcctcgcgaaagacttctctttccgctttgataggcgcggaaaaccaggctttgcgccagcggcgaatcgctaccggaatcacccgctcgacggactcatgccatgaagggatctgtgcgaaaccctcttcaaccacccaatcaaagcggatgccgggaatggcctgcgcggcgtcggttagcgcgggcagcgtgtgcagcacgtcgcccatggaggaggttttaacgatcaatacccgcatccgttacgcttcctcgtgctcggttttttccgtcaacagttcgttcagctcctgcaggacgcgctctggagtgatgtcgataaggctttgatgatagccctcagcggcatcccctttgcgcactttgtggtagccgctaatcaggcgaataacgcgcgctttatgcgacagcggcggggtaaagtccgggctgctcgggccgtacagcgccaccagcgggcggtccagggcggcggcaacgtgcatcagccccgaatcattgctgaccacggcctgacaggcggcaatcagaatcacggcctgttccagctgcgtttcgccggccagattacggcaccaggcctgctgctcgctgctgagcgcggcgatgatctctttgccggcatcgttatcttttgctgagccgaagagcgctatctgataaccatcgtcaatgagctttttcgccagcgcggcgtagtgataatgcggccagcgtttggctgggccgaattctgcgccggggcagaagccgataattggccgctcgtttgagagattaaaagcgttgcaggcctgtgacttttcgccgtcgttgacctgcagctgcggccacagcagcggctgtggaaggtctttagcgcagcgcatgacgccgttgtcgtaggctagcgccacgtagcgttccaccatcagcggccaggcgtctttgtccagcacgcgggcgtcgttaagcaggccgtagcgcatctcgccgcgccagccggtgcgcagcgggatgttggcaaagaaaggcaccaatgccgacttaaacgagttcggcagcacataagcgcgatcgtaacgacgatcgcgcaggctgtggccgagtttgcggcgttcgccgatagccagagcgccgtggcccagcggcatggcgatcgcttcattgacttccggcatgcgcgataacaacggacggcaccatgccggcgccatcacgtcgataatcgcctgggatagcgcgccctgagcgtacgataaagactttgcgacatcatcatgtcgcccacccatgaggggcctatcaccaatattttcatgcttgtttcttacgcgtcgcggttgagccaggccatatattccgttacgccttcggcaacggttttgaacggtttgttatagcccgctttacgcaggttagtcagatcggcctgcgtgaatgcctggtagcggcctttcagtttgtccgggaacgggatgtactcaatgctgcctttcttatggtacgccagggttgcatcggcgacggcctggaaggattccgcgcggccggtaccaaggttgaagataccggaaacgccattttcccagaaccacaggttcaccgcggcgacatcgccgacatagacgaagtcgcgtttgaagccgtcgctgccttcgaacaatttcggactttcgccattattcagctgggtattgaggtggaaagccacgctcgccatgctgcctttgtggccttcgcgcggcccgtagacgttgaaataacggaacccgacgatctgcgaatccgcttccggcaggatctgacggacgtattcgtcgaacaggaattttgaatagccgtagacgttcagcggtttttcgaattcgcgggactcgataaagtcgctggtgcgtccgccgtaggtggcggcggaagaggcgtacaggaacgggatttcgcgctccaggcagtagtgcagcacctctttggagtactgatagttgttatccatcacatacttgccgtcccactcggtagtggaagagcaggcgccttcgtggaataccgcctcaatctcgccgaactcttcaccggccataatctggatcagaaaatcttctttatccatgtagtcagcgatgttcagatccaccaggtttacgaatttggtgccgtctttcagattgtctacaaccagaatatcggtgatgcctttgtcattcagggccttaacgatgttgctgccgataaagcctgcgccgccggttacgatgatcataactgtacctttgaagtagaaggtccggagacaatccggacacgaatactcatatcatatcactacatccgaaaggcttcagccattcgccgaaaaggtgctggccgcgcgtgatttatgctgcaaattattcattcaggcctgcatcatctcgtatcaacgtatagctttgggtaatatgtgccaaattttgccgaatctggagagttgcaatgcgtggtgatttctacaaacagttaaccaatgacctggataccgcgcgcgcggaagggttgtttaaagaagagcgtatcattacttcggctcagcaggcggacatcaccgtcggcgacagccacgtcattaacttctgcgccaacaactatctgggcctggcgaaccacccggaactgattgccgcggcgaaatccggtatggacagccacggtttcgggatggcctcggtgcgtttcatctgcggtacccaggacacgcataagcagcttgagaagaagctggcggatttcctcggtatggaagacgcgattctctactcctcttgcttcgatgccaacggcggcctgtttgaaacgctgctggggccggaagacgccattatctctgatgccctgaatcacgcgtcgatcatcgacggcgtgcgcctgtgtaaagctaagcgtttccgctatgccaacaacgatatgcaggagctggaagcacgtctgaaagaagcgcgcgaagccggcgctcgccacgtgctgatcgccaccgatggcgttttctcgatggacggcgtgatcgccaacctgaaaggcgtttgcgacctggcggataaatacgatgcgctggtgatggtcgatgattctcacgccgtgggctttgtcggcgaaaatggccgcggttcccatgaatattgcgacgtgatgggccgcgtcgacatcattaccggcacattgggtaaagcgctgggcggcgcgtcaggcggttacaccgccgcgcgcaaagaagtcgttgagtggctgcgccagcgttcccgtccgtatctgttctccaactccctggcgccggccattgtcgcagcgtctatcaaggtgctggagatggtggaagcgggcagcgaactgcgcgatcgcttgtgggctaacgcgcgcctgttccgcgaaaaaatgaccgccgccggctttaccctggctggtgccgaccacgcgattatcccggtgatgctcggtgaagctaccatcgcgcaggaattcgcgcgcgaactgcagaaagaaggtatttacgtcaccggtttcttctatccggtggttccaaaaggccaggcgcgtattcgcacccagatgtcggcggcgcatacccctgaacaaattgaacgtgcggtggaagcctttacccgcatcggcaaacaacttggcgtcatcgcctaataagggtgtgagatgaaagcgttatccaaactgaaagcggaagaaggcatctggatgaccgacgtaccggaaccggaagtcggccataacgatctgctgattaaaatccgtaagaccgcgatttgcggtaccgacgtgcacatctataactgggacgaatggtcgcagaaaaccatcccggttccgatggtggtaggtcatgaatatgtcggtgaagtcgtgggtatcggtcaggaagttcgcggctttaagcttggcgatcgcgtttccggcgaagggcacatcacctgcggacactgccgcaactgccgcggcggtcgtacccatctgtgccgcaataccatcggcgtgggggtaaaccgcccgggttgcttcgctgagtatctggtgatcccggcctttaacgcgtttaaaatcccggacaatatctctgacgatctggcatccatcttcgacccgttcggcaacgctgtgcataccgcgctttccttcgacctggtcggtgaggatgtactggtttccggcgccggcccgattggcgtgatggccgcggcggtggcgaaacatgtcggcgcgcgtaacgtggtgattaccgatgttaacgaataccgcctggagctggcgcgtaaaatgggcgtcacccgcgcggtcaacgtggcgaaagagaatcttaacgatgtgatggcggagctggggatgaccgaaggcttcgacgtgggtctggagatgtccggcgcgccgccggcgtttcgtaccatgctcgataccatgaaccatggggacgtattgcgatgctgggtattcctccgtcggatatgtctatcgactggaccaaggtcatcttcaaagggctgtttatcaaagggatttacggccgcgaaatgtttgaaacctggtataagatggcggcgttgatccagtctggcctcgatctttcgccgattatcacccaccgtttcggtattgatgacttccagaaaggctttgacgcgatgcgttccggccagtctggtaaagtggtgctgagctgggattaagcgaattatcgtcaggatgacgataataagcattcttgctgcccatgaatcatgggcagcttatccttttcatatatatcgataataaagttattgttattactacggtcactattgaactggtgtcgggtttatttatattctgccatatcttcatataacaaggatgagatatatggcacaccctatttttatcagccgtctttggcaattgaagaatattatcttgccggtactactgctaatggtaagttttggcattcaggctgagcgcaggcttgagcatggcgtactgcaagcctactggaaggcgcaatggagcgataacgcgaccattaatgttcctgccctcggatttcgatattattggctggatgaccaggggaaattaaaaaaagtcatcaatatatatgttaaaggaacgctgaaagaacagttgctgtttattcggcagaactttagtgatatcccggaaaattttatcaaatttcgcgagtggtacgttaaccagcagggtagtctgctggttaataatatcgcgcagtataccgaatgcagcagtgagaattatagcgccgtattgctttcttttgttcctgtgcaaaataaacctgcatcaaatatagacgatatgaatgctcaggtcccctgcggcggggacgggcgctatccctggttaacgacatatcatttacagcatgaatggaatcagctttcattcaaagaatggccagatgataatgcgaataatacatattccgttatggctgatgacgtggtggtgaaaatacgcactattaacaaatactggatctatgccgctctttacgatgacagcaaagcggaccgtatgagtgacaaacggggtacataaggagagggcatctcaaaccagataactgacacccggtggtatcggacaatgtgatgaaatttatctcaaggtagatttatttagatttggataacatttctaaaataatacgtatctatcgcactatttccgcatcgatcttttgcctattcgtttatacagttgatttaatcttcgtttaatcgcataaaccctatgtttaaactctcagtatgcttgcttacctgtaattcggcccgcttattacgggaggtcttgccgccgctgttgcgcgtggcggatgagtttattgttgttgattccggtagtacggatgaaacgctgcagatatgtcagcagtttggcttaacggttcaccatcacccttatgccgcccacggcaagcagatgaattatgcgacctcgctggcaaaccatgactgggtgctatgcatggatagcgatgaaattctggacgaagaagtggttgcggcgattctggcgcttaaggcgggagaggaaccggatccgagctgcgcgtggcgcctgccgcgctactggttcgtgcttggcgagcaggtgcggaccatttatcccatctcatcgccagattacccggtacgcttgttcaaccgtcagcgggccagttttaaccagcgtccggtagacgatcaggtggtcggccatctgacctcgacaaggctgccgggctttgtccgccacgataccttctattcactgcatgaggtgtttaacaagctcaacagctataccacccggctggtgaaggcgcagaaggtcaggccatcgctcagtcgcgggatcatcagcgctatcggcgcattttttaagtggtatctgttcagcggcgcgtggcgcagcggcaaggtgggggcggtgaccggcttgtacgccaccttgtatagcttcatgaagtattttaaagcctggtatgcccacgatggtaagcaggagggaaccgtgccggagaagcgcacggatccctgatgaagattagttggtggggctatcccagccctgccatttcaactggtagtactggaccagcgcgctctggctaatgctttcgctgagaatgctaaagaagcggctggcgttcaccggctccagcggacgcttcggtttgcagtacttcacgccatggaacgggttacgcggcttctgctgttgcggcgcgtttggttggacgggcgtgttcggcgtcgagttgtcgacctgcggttcgttcagcaggctgctcgggcgcaccagcgtgatatccggcggcaggttatagaccatttgctgtagtacccgcaccgttgaaggatgcgggtggccaatggcgatcgccgaaccattacgccgcgccagcgcgatggcgcgattgaactgagtgcggatgtccgcctcgttctgggtgtcgtcgagaaacactttgcgtttaatcactttcacgccggtaccctgggcggctcgcatagcctgggtgttgccgatggtcacgctatcgagaaaatagagattgtagcgttccagcgcctgcatcactttctgcataccgaacaggttagaggtcatggcgctacccatgtggttgttcagcccgaccgcgtaaggcactttaccgtaagcctcacgaataattcgttcgatctcatcgctgctcatatccgggcgcagcgtgtctttttccagcggttgcttgctgagcggcgccatcggcagatggatcagcacttcgtggcccagattatgcgctttagtggccatttcccgggcgtgggggcattcggtagtacggcgacggagatggtaggcggtagcgccagtaccttattttccgtctgcggacggtagccgaaatcatcgataatgatggagagtttaccggcgaaaaccggcgcagctatagccagtgaaccggctacagcaagtgcaatcatgcgaaattgaagcaaaacttatcttcccaaccacggctgtggattgaccgcctgaccctggcggcgaatttcgaaatagagcgacggacgaccctgaccgccgctactgcctaccagcgcgatagcctggcccgcgcggacctgggtaccgacgctgaccagcgcgctttggttatagccgtaaagactcatgtcgcctttgccgtgttcaacgacgaccaccaggccgtagccctgtagccagtcggcgaggatcacccgaccatcggcaatggctttgacttcggtgccttcagacgcagcgataaccatccctttccaacgtagttcaccttgcagctgttcgccataacgatgaagaattgttccgcgtaccggccagaaggcctgcccgcgcggcgcgccgaggccgccggttcgcgacatcagcgaacgttcgctttcggttggtttataggtggtgcctttgcgcgaggcctcctgctggcggttacgtatcgcctgagcatcacgagcttcgcggtcggcacgggctttggctgccgcttccgcctgggcgatacggccgcgcaggcgcgattcgttagcgcgcagttcgctgagctgctgttgacctttctgaatggaggattcgaggctggagagcgtctttttacgctcgttgcgcgcctgctcaagcttggcttgctgcgctttttgctcgtaaaccagcgtttgctgctggctttgtttttcttccagcatcgatttttgcaccgcgacttcttcgcgcgtctgcttgagctgggcgatggtttcctgacgggcctggttaaagtaaccaaaataggcctgcaggcgctggttacgctgcccttcttcaccgctgaggatcatctgcatgccggtgtgcggcccctggcggaacgcggcatcaagctgcgcggcgaggttacgttcctgtgaggcgcgctgacgctccagcttagcgatagacgcgttcatgtcgtcgatctgcttgttgagctgattgagagtatcctgagtttcacgcagtttgcgcgcggcggcggaaatggcctcttcctgcgcttttaactgggcgagcagggaggagcgttgttgctgctgttgctgaatcgcgcgctgtttggcggcgatatcggcctgaatggatttcagctggtcgcggtcatcggcgtgagcggatgcggcgcacagcaatacgccagcgctaagcgcgctggcgtaaagaacggatcgaacagccgttgcgatccatgtatttgaataagtcgcctttcccctcatggggaaggattattccacgatgaacagcggcttgccagtcatctcttgcgggatttccattcccatcagcgacagcatggttggcgcgatgtcggaaagcttgccgccttcggccactttcaccgttttgtcgccaacgtagattagcggaaccggcaggttagtatgcgcggtgtgcgcctgtccggtcgccggatcgcgcatctgttcggcgttgccgtggtcggcggtgatcagcagctggccgccgacagattcaacggccgcggccacttgttcgatgcagtgatccagcgcttcaaccgctttcaccgccgcttccatcaccccggtatggcctaccatatcgccgttcggatagttacagataatggtgtcatactggccgcctttgatggccgcaaccagtttctcggtcagctcggcggagctcatttccggctgcaggtcgtaagtggcgaccttcggcgagttaatcagaatacggtcttcgcctttgaacggattttctaccccgccgttaaagaagaaggtcacgtgcgcatatttctcggtttcggagatgcgcagctgggttttgtcgtgcttcgccatccactcgccgaaagtgttcaccagtgaggctggtggatacgcgcaagcgactttgatgtccgcggcgtattcggtcagcatcacgaaatcgaggttaacgactttcttacgcgcgaagccatcgaagtcggcgttaacgaaagcgcgagtgatttcgcgcgcgcggtcagcgcggaagttcatgaagatcagcgcgtcgccgtcttccattgcggcatcggcctggccggcggcacggataacggtcgctttgacgaactcgtcgttttcatcacgcgcgtaggctgcctgcagacccgccacggcggtgtcggcctggaattcgcctttggccagcgtcatcaggtcataggcttgttctacgcgatcccagcggttgtcgcggtccatggcgtagtagcggccaatgatagaggcgatacggcctttgcccagcgcggtgaatttagcttcgaatttagccagcgtggcttcagcgctgcgcggcggcgtgtcgcgaccatcgaggaaagcgtgcagatagattttctctgcgccacgttcggcggccagttctaccatcgccatgatgtggtcttcgtggctgtgaacgccgccaggcgacatcaggcccatgatgtgtaccgctttacctgcggcgacggctttgtcgaccgcgccagtcagcaccgggttggcaaagaaggtgcgttctttgatttcaacgtccagacgggtcagatcctgatacacgatacgacccgcgccgaggttaacgtggcccacttcggagttacccatctggcggtcaggcagaccgacctccagaccggatgcgtcaatcagggtgtgcggacgttttgcccacagtgcgtccattaccggcgttttcgcgctataaatggcgttatcctgctggtcttcacggtagccgtagccatccagaatcaccagtaccataggttttttagtaaccgacattgcgacaacctcatgctcaaagacagaaaatttgcgtaattttactacagctgaatcgatcaaatcaccgtaaaagatcaaagaaagggaaggggcgacgccagagccgatggcgaagtcggttttttttcgtgacgggccgcagaaaatacattacatcgcgctcactggctgtatttgccgcaatgcacaggtatactccttccctggtttttttatcacttagtcgggagttgtaacccccatgcaagaaattatgcaattcatcggccgtcacccggtcctgagcatcgcgtggatcgcgctgctgggtgcggtactgttcaccacctttaaagggttgatgtcgaaagttaaagtcatcacccgtggtgaagcgacgcgtcttatcaacaaagaagaagccgttgttgtcgacctgcgtcagcgtgacgacttccgtaaaggccatatcgccggcgctatcaacctgctgcctgccgatatcaaagcaaataacgtcggcgagttggaaaaacacaaagcacaacccattattgttgtggatgggtccggtatgcaggcgcaagaacctgccagcctgctgaataaagccggattcgaaaaagtctttgtactgaaagaaggtatcgcaggctggagcggcgaaaaccttccgctggtacgcggcaaataatttacccccgcgtcgttatggcgcagtggttcccccgataacctctcagatggcggggagcctctgcggcgtaaaatccctcggggtaaaaacaggagtgagtcatggccaatattgagatctataccaaagcgacctgcccgttctgcatccgcgctaaagcgctgctgaatagcaagggcgtgacgttcaacgaactgcctatcgatggcgatgccgcaaagcgtgaagagatgatccagcgcagcggccggacgacggttccgcagatttttattgatgcgcagcacattggcggctgtgacgacttgtatgcgcttgattcacgtggtggacttgatcccctcttgcgctaatttttacgctttccccattcagggggcgcgtatttaaggacaacacgaaagggttttactatgtcagaacaaaacagcaccgaaatgactttccagattcagcgcatctacaccaaagacgtttccttcgaagcgccaaatgcgccgcaagttttccagaaagattggcagccggaagttaaacttgatctggataccgcttccagccagctggctgaaggcgtttatgaagtggtgctgcgtgtcaccgtaacggcatcgctgggcgaagaaactgcattcctgtgcgaagtacagcagggtggtatcttctccatcgacggcatcgatggcaaccagatggcgcactgcctcggcgcgtactgcccgaacattctgttcccgtatgctcgcgagaccgttaccagcctggtttcccgcggcaccttcccgcaactgaaccttgcgccggtgaactttgacgcgctgtttatgaactatctgcaacagcaggctggcgaaggtgctgaacaacatcaggatgcctgatgaacgcgcttaatgctgcaatgactgtgatcggtgccggatcttacggcaccgctcttgccatcaccctggcaagaaatggccacgaggtcgtactttggggccatgacccgaaacatatcgcgacgctgcaacacgatcgctgcaacgccgcgttccttcccgatgtgcccttcccggacacgctgcaccttgagagcgatttagcgacggcgctggccgccagccgcgatatcctcgtggtggtgccgagtcacgtcttcggccaggttctgcgccagattaaaccgctgatgcgttccgatgcgcgtctggtgtgggcgacgaaaggtctggaggccgaaaccggccgtctgctgcaggacgtggcgcgtgaagcgctgggcgatgacatcccattagcggtcatctccggtccgacttttgccaaagagctggccgccggcctgccgacagcgatttcgctggcggcgacggatccgcagtttgcagaagaccttcagcgcttgctgcactgcggtaaaagcttccgcgtctacatcaacccggactttatcggcgtgcagctgggcggtgcggtgaaaaacgttatcgccatcggcgccgggatgtctgacggtatcggctttggcgcgaatgcccgtacggcgttgatcacccgtgggctggtggaaatgtcccgtctcggggcagcgctgggcgccgatccggaaaccttcatgggcatggccgggttgggcgatctggtactgacttgtaccgataaccaatcgcgaaaccgccgttttggcatgatgctcggacagggcatggacgtgcaaagcgcgcaggacaagattggccaggtggttgaaggctatcgcaataccaaagaggttcgcgttctggcgcagcgtttaggcgtcgaaatgccaataaccgaggaaatttatcaggtattgtattgcggaaaaattgcgcgcgaggcagcattgaccttattaggtcgcgcacgcaaggacgaacgcagcgccaactagccgcagggaaagtctgttacctgtatgaccggtcagcgaagaactgaccggtcataattcttatcgtctggagtatgcaatgccgtgtgaagaactggatatcgtctggaacaatattaaagccgaagcccgggctctggccgactgtgagccgatgctcgccagtttttaccacgcaacgctacttaagcacgaaaatctgggcagcgccctgagctatatgctggcgaataagctggcctcgccgattatgcctgctatcgctattcgcgaagtggtggaagaggcctatgccgctgacccggagatgatcgcttccgccgcctgtgatatccaggcggtacgtacccgtgaccctgcggtcgataaatactcaacgccgctgttgtacctgaaaggcttccatgcgctgcaggcctatcgtatcggccactggttgtggaatcaggggcgccgcgcgctggctatttttctgcagaatcaggtttccgtctcgtttcaggtcgatatccatccggcggcgaagattggccgtgggatcatgctcgaccacgccaccggtatcgtggttggtgaaacggcggtgattgaagacgacgtatccatcctgcagtccgtgaccctcggcggtaccggtaaaaccagcggcgaccgtcacccgaaaattcgcgaaggcgtgatgattggcgccggggcgaagatcctcggcaatatcgaagtcgggcgcggggcgaagattggcgccggttccgtggtgctgcaaccagtgccgccgcataccaccgccgcaggcgtaccggcgcgcatcgtcggcaagccggagagcgacaaaccggcgatggatatggatcagcattttaatggcatccaccataccttcgagtacggcgacggaatttgatttattgccatttgccgcagcgaagctcagaaagtagcccggataaggcgcaacgcgccgcaatccgggaaccactctggttagctgcgcaacacggcgccagggtatcccaactgacgccaggcttcatacaccaccaccgacaccgcatttgacaggttcatgctgcggctgtccggcatcatcggaatacggattttttgctccgccggcagggcatcgaggatgctggccggcaggccgcgcgtttccggaccaaacatcaagaaatcaccatcctgatagcttaccgcgctgtgggcgggcgtgcctttagtcgtgagggcgaacaaccgttgcggcttcgcgctggcgacaaacgccgcgtaatccgcgtggcgctgtacggcggtgaactcgtgataatccaacccggcgcgtctcaggcgtttatcgtcccaggtaaagcccatcggctcaatgatatgtaaattgaagccggtgttggcgcacaggcggatgatattgccggtgttcggcgggatttctggttcgaataacacgatgttcagcatactgccccttaatagcgggggcaggatagcagatatttgttgaaccctcaccccgaccctctccctgagggagagggagaaaaccgattccagccggacgggcccctcaccctgaaggagaggggtggcgtaagggaaaacgaggggaattacgcggcgttgccctgcttgagcgcatcaaaggtctgcagcgcttcggcattctgcaccagcgaatcgcggctgatttcgctgatagacttcgctccggtcagggtcatcgccactttcatctctttctcgataagattgagcagattcgccactccctgcttgccgtgagtcgccagcgcgtacagatatgcgcggcccagcagcacgctgtcggcgccaagggcgatcatccgtaccacgtcgagaccgttgcggataccgctgtcggcgagaatagtgatgtcgcctttaaccgcatcggcaatggcgggcagggcgcgggcggaagagagcacgccgtcaagctggcggccgccgtggttggagacgacaatgccgtcagcgccgaagcgcaccgcatcgcgggcgtcctccgggtcgaggatccctttgatcaccattgggccgtcccagaagtcgcggatccactccaggtctttccaggaaatcgacggatcgaaattattcgccagccagccgatgtaatcctcaagcccggtcggtttgccgaggtaggcggagatattgcccagatcgtgcgggcggccgttgagaccgacgtcccatgcccactgcggatgagtgacggcctgccagtagcggcgcatggcggcgtttgggccgctcatgccagaatgggcgtcgcgatagcgcgcgccgggggtcggcatatccacggtaaagaccagcgtggagcagcctgcggctttggcgcgctccagcgcattgcgcataaatccgcgatcgcgcaggacatacagctggaaccacatcgggcgtttgatggtcggggcgacctcttcaatcgggcaaacggaaacggtagagagggtaaacgggatgcctttgtcgtccgccgcgcccgccgcctgcacttctccgcggcgcgcgtacatgccgcacagcccgaccggcgccagcgccgtcggcatcgccagcttctcgttgaataacgtggtctccaggctcagatccgacatattgcgcagaatgcgctggcggagcgccacgtcggagaggtcttcaacgttgcggcgcagggtatgttcggcgtaggcgccgccgtcgatatagtggaacagaaacggtggcaggatacgctgtgcggcggcgcgatagtcgctggcggcggaaataatcatcacgagttctccctggaattttcattgtggtcaccgggcaggcgggtaatacgcgcctggcgggcctggtcttcatcaaaacgtttaatggtggcgtggacaaaaccgaggtgggccatcatcgcctggcgggcgccttccgcgtcgccggcgaagatcgcttccattaccgcctgatgttgttcggtcaggcgcgcgaacaccggcggcaccagatacatgcgctggcggctctgcttcaccgaggattgcagaagctcgaagaaaccgcgcatagtttgcagcagcaccacattatgtgaggcttcagcgatcgccaggtggaagcgaacatccgcctgtgaggcgagatccgggtcatcgctgagggtggcttcaaaacagaggcggattttttctttttcggcgtcggtggcccgcatcgccgcatgccaggcggtgctggcttcaatagcgtggcgggcttcgagaatatcaaaactgtagtcggggtcgtcggcgagcagcgttttcagcggctggacgatgttttgctccgaccagggctcatgctgccagcgcacgaaggtgccgccgccgcgacggctaagcagcaccccttcgttgaccagcatcgccagcgcttcacgcaacgaattgcgtgaaacaccgagctgaacggcaagctggcgctcggcgggcaaacgcatgcccgcctccagctgttgttcttctatcagcgcccggacgcgaattgcgacgtcgtcagccaggcgttttggcatcactttcacggaatcatccaggttaagacataagcctgcagggtggtaatcaggcccaccatgcaggtgaatatcaggctgtgcttgacggtaaagcggaacaggtccgactctttacccaccaggcctaccgcggcgcaggcaatggcgatcgactgtggcgaaatcatcttgcctgtcaccccaccggtggtattcgcggcgaccagcagaatatcggagacgccgatttgctgggctgccgtcgcctgcagcgcggcgaatagcgcgttagacgaggtatccgaaccggtcaggaaaacccccagccagccgaggaacggcgagaagaaggtaaacgcgtggccggtatgcgccagcgccaacgccagcgtcgatgacagcccggagtagtttgaaataaaggcgaacgccagcaccatgccgatggagtaaataggcagcgccagctctttcaacgtcccggcgaaagtggtcagcgcatcctttggcttcatacgcagccagacgatagacagtatagcggcgaacagaatggcggtgccggtcgccgacagccagtcgaatttatacaccgcggcgtacggcgtcgcggcgcttaccaccggcggcatacgggcgaccattttgtcgaggaacggtaccgggatgttaaccacgaagtcatacatcgccccgcccggcgcaaacagcgctttaaacggcggtatgctccacagggtgacggtggcggtgaggaacaggaacggcgaccaggcgcgaatgacctgaccgacggtgtaatgcgtgcgcgccagcgtttgatcaacctgtgcggcgcccatatcgccaaaacggaagatacgcaccggctgccagcgcttgaggaacagggtcaggcataccagcgataccagcgaagagatgatgtccggcagttccgggccgaggaagttagagctgaggtactgcgcgatagcgaacgagccacccgcgaccatcacagcaggccacgtctctttcaccccgcgccagccgtccataatcgccataatccagaacagcacgataatggttaggaacggtagctggcggccaaccatctggccgatagcgaagctatcgatgccggtcacctggccggcgaccagaatcgggatccccatggcgccgaaggccaccggcgcggtgttaacaatcaggcacagcccggcggcgtatagcggattgaagccgagcccgaccagcagcgcggcggtgatcgccaccggcgcgccgaaaccggcggccccttcgaggaaggcgccgaaggagaagccgacaatcagcatctgcaggcgctggtccggtgtaatcgaaagaatcgacgagcggataatgtcgaactgcccggtctttaccgagattttatagacgaagaccgcggcgataataatccacgcgataggccacaggccgtagaagaagccgtataccaccgacgataaggcgcgatcgaccggcattttgtagaacagcagggcgacaagcagcgcgatggctacggtccaggtggcggcgacatagcctttaagcttgagcttaatcagggcgaaaaagaaaaacagaatcggcagtgaggcgataaggctcgatagccagatattaccagccggatcgtaattttgttgccagaggttcatgcaggtctccatcgggccacatccagtgcgtcaggttgggtctgcgcccattgccgatcacactgtttgtaaaattggcccagccaaattgcgattatagggttaacgacaattgatggttaacaaaatgttatggcatggcaacgcgtttgtgatgcaaagtgatggatatgtgaaccgattgacggtttaagaaataattggttgggccaatttagcggggaaggggaaattggctgtgagttcacggcccggtagggctaccgggtaaaagacgacaaactcacagcggcaaaagattaaaactcgctcttcgcgaagccggtcatctctttaaggcccatttcacggcccagcgcggtcatcggatggacgacaaccagtccgcgcacgcttttcttcagcttgcccatatcggcctgctcttttttggtgatggcgcgacggtgcggcatgctcatcagtttctgtgcttctttgctcagcttctgcgactgaacggaacgcaggcgttcgatttccgtttccagggtcgctttttctttttccagctccgcgtatttatcggcggcttcgaccaaagacaggtcggcctgctggtggcggatggcgtcgagacggtcgctcaaacgcttgatttcattcttttcgacttctttcatggtaattttatctgtgaataaaagggctttgacgctacatagtatgggccgggagggccatagttgatagttttttatcgaaatactcgcggcttcactgccgtaagcatgagacctgatacattataactgtctgaatagtagcgatattgtaattttaattaagctgtttatcatttttgtgaagcctgacgaccattcagcacgttttcctcaacttgctccctttttttcgccaatccttaataagatccccctgaacagaggagagcgtgatggcgaaaatcggcgacggcgtaccacgtatcatcgataaaacggtagatttcatggcctcgagccaggcgtttatggaatatctgaaaaaatgcccgcgtttacagcggataccgcgcgatattcctgaggataaaaaagcgctatttttgagtcgtctggagtattaccggcagctgtaccggccgacgtgcgaccagcaagaagcggagtcagagcgttgatttctggaaggctttttttaagctgattcgggaaatcagctcagtcagagacaacaccatcgtagaacgtaccatctgctggtagcgcagtttctgcattgccagcagttccttatcgctctcatcaaacagcggcgttggcggaagcgcggcgacgcagtgcagctcgcctaacggcccgagaatttcatcgtcggtgaaagcgtactcattgccgtcatgattgagctcttcccgcaaggccatcaatagctcggcatcttcgtattcggcgcggcttatcaccccaaggccgtagataagcttcaggcgtacggaaagatcgcccagcggtccactgccgtccagcaatggctctactgcgtatttcaccgcgtaatcgtctttgcggaatacctgaagcaccagaatattgaccgcctccgtcaggagttcgacggcggctatcaggaaacttcttacggtcttaccagcatttaaacgctcaagtacgcggttttcaaatgcctgtgtttcttccattattgcctgcatatcggacaggagtggtattgggcgcggcatcggccgcgccaggttgtatatcattttaccgcgttgtagtcgtcaacggcttccgtcactacagcgcttgccgcatccagaccggaaatctgcgccagcgcggcctgtggccctttttcggcaatcagcgtcgccagctcctgcgcctgcggatcgtcttcgctgcggaaatgcatggccgcggcaatcccttttaccaggttccggtgcggcaggccgtattccagcgtgccaagcagcggcttgatcaaacgatcgcccgcgctcaatttacgcagcggctggcggcctacgcgctccacatcatctttcagatacgggttctcaaagcgaccgaggatcttctggatataagccgcgtgtttctgcgcatcaaagttgtagcgtttaatcagcaccgcgccgctctcttccattgcgcctttcacgacggcgcgaatgtgctcattgagaatcgcgtcgcgaatcgtttgatggcccgccagtttcccgaggtaggcggttatagcatgcccggtgtttaaggtgaatagcttacgctcgacaaatgccatcaggttatcggttaattccattcctgggatgttcggcagttcgcccttaaactgggttttatccacaatccattcgctgaatgtttcaacggtgacttccagcggatcgtgggtggcggaagccgacggtggcacgatacggtctacggcggaatcgacgaagccgatatgcgcttcaacccacgctttgtcctcttccgccagcgtgttaaagacgtggcctttcagttggctggtgccgcgtaccatgttttcgcaggcgataatattcagcgggcgttcaataccctgcgctttgcgtttcaccaggcctttggcgatggctggggcgatacgctccagaacgacggggccgaccgcggtagtcaccaggtcgacatcggcgatcagatccaccacctcatcgccaatgctgctgacggcattcacgccggagacggtatcaacctgttcgttttcacccaccacgtgaacctgatagctatgacgggcattcagggcgtcaaggaccacctgattaacatcggcgaacgtaagggtgataccggcatcagccagcagtttgccaatgaagccacgtccgatattacctgcgccaaaatgtaatgctttcatagtattaaccttcaattaatgtttttacctgagagggctggggtgaggcttttcccctcaccccaaccctctcccaaagggagagggaatggagcgttgtggttatttattcagcaacgacaggacttcttcgacgctggtggttttcgccagccgctcaatcacggtttcatcatccagcgcgttggtcagactggtgataacgtgaatgtgttcgttgttgcgggcggcgataccgatgaccagacgcgcgacttcatcttcttcttcaccgaagcgcacgccttccggatactggcagaagacgacgccggttttcagtacccggtctttcgcttcaatggtaccgtgcggtaccgcgatggattcgccaagataggttgaggtcagcttctcgcggtcgagcatcgcctgcacgtattccggctcaacgtatccacctttcaccagttgttcaccggcgaagcgaatcgcctcttctttggtcgccgctttgcgcccgaggaagatgttatccgcgcccagctggaacaggtttttgttggtatcatcaaagctgtctttcaggctatcggtgactttcacttcgttgtcgatgtgacgctgcgccgccaccagacgctcggtcaggctggtatacaggccgctgtcgaggaagttggtcagcgaaatatgctgcgcctgcggtacctggcgcatggcgcgctcggtcagatcgcggtgggttatcaccaggtcgacatccggcggcagattgttaatcgcgctgttggtgacagagatattgctcagtccggcatcctggactttcttacgcagtaccccggcgcccatggcgctggaacccataccggcgtcgcaggcaacgatgattttacgtacgtggctcaggtcgttagtcacgtcgcccgccgccagcggcgtcgccgcgcctttggactcggctttcatgtcgtgcatgcgacgtgtcgccgcttcgatatcgtcttcttctttcactttgctggttttcagcaggatggcggagacaataaaggagaccgccatcgccgcgataatggccgcgatgttagcgaagtaggcgcctttcggcgtcatcgccagtaccgccagaatggaacccggggaagccggggaaaccaggccgccgttgaggatagtcagggtgaagacgccggtcataccgccgaggataacggccagaatcagacgcgggttcatcagcacgtacgggaagtaaatttcgtggataccgcccaggaagtggatgattgccgcaccgcccgcagactgcttcgcgctgccgcggccaaagaacatgtacgccagcaggacgcccatccccggacccgggttagcttcaatcaggaagaaaatggatttgccaagctcatgggactgctggatacccagcggcgagaagataccgtggttaatcgcgttattgaggaacaggattttcgccggttcaacaaagatagacgccagcggcagcatgtcgtgcgccaccatgaagttaacgccggccgccagcagttttgacagcacttcaaccgccgggccgatgccgaggaacgccagaatggcaaggatcatcccgatgatgccggcggagaagttattcaccagcatttcgaaaccggatttgatcttaccgtctacccaggcgtcaaatttcttgatgcagtagccgccgagcgggccggcgatcatcgagccgaggaacatcggcatatccgcaccgacgataacgcccatggtggtgatagcgccgacgacgccgccgcgttcaccgccaaccaacttaccgccggtataaccgatcagcagcggcagcaggtaggtaatcatcgggccgaccagcttcgccagcgtctcgttcggcaaccaccctgttggaataaataacgcggtgataatccccacgcgataaacgcgccgatattcggcatcaccatattgctgaggaaacgaccaaagctttgcaccttgatcttgatatcggatgacataaaacaccccttcttctgttttgcttatcgcgcaggctgaacgcccgaggtttgttgttaatgtggcggcagaggtagccggaccctgattgatagtgcgaaatctggcactgaatcgttaagctgtctagtgagtgactttttatgtgatttgtgtcacatgaatataggtgtctggcacttatatgtagtgatcaccatcacaaaaatggtgtgtaaaaaaacaacaacaggcgatggaagcccctgaatcgcatatttatgtgatattagtcacattataactttgcgtttttgttatttgtttgtgattcacatcacaaaatattttgcgttcaattccgctgtgtgtgatccaccgcaggttatgtctttcccggcagccaactatgtaactttgcaacccgtctgcgcgaagaacattttttgccgctaatggcggaaatgaaagcggtgaattatgctcaaattgtcagtcaggcgccgtttcgctgacgctcacaatcccaataatctattagcgtgaatcgaggaaattatgtttctcaattattttgcgctgggcgttctgatcttcgtttttctggttattttttacgggattattattttgcacgatattccgtacctgattgcgaagaaacgtaatcatccgcactctgacgcaattcacgtggcagggtgggtcagcctgtttacgctgcacgtgatatggccatttttatggatctgggccaccctctatcagccggagcgcggctggggaatgcagcataagccaaataaagcagggcctgatggcgccgacagcgagctggcgcagctcaatcagcgtatcgctgaactcgaacataaaatcgctcatctgcagccggcagcgccgccatcctcgacggagaaataatcatggacctgttgatcattttgacgtacgtagccattgcgtggtcggtatttaaaatattccgtattccagtaaataaatggacggtcccgaccgcggccctgggcggcgtatttattgttagcgcgcttattttattaatgaactataaccacccttatacttttactgcgcagaaagcggttatttcaattcctattacgccgcaggttaccggcattgttagcagcgtgactgataaagccaaccagcgggtgaaaaagggcgaggtattatttactatcgacccggcgcgctaccaggcgcgtgtcgacaggctgcaggccgacctggtcaccgctctgcacagtatcaataccctgaaagcccaactgcaggaagcgcaggctaatactgtgcgcgtctccgccgagcgtgaccggttgtataaagattatcagcgctatttgaaaggcagccaggcgcgggtcaacccgttttcggaaagcgatatcgataatgcgcggcaaaactatcttgcccaggatgcattggtaaaagcctcggtcgccgagcaggcgcagatacagagccaactggatagcacgctgaatggcgaacagtcgcaggtggtgagcctgcgtgcgcagttggcggaagcgaaatataatctcgatcagaccaccgtccgggcgccgagcgatggctacattacccaggtacttattcgcccgggaacctacgccgcgtcgctgccgctgcgcccggtgatggtctttattccgcaacagaaacggctaattgtcgcccagttccgccagaattcgttgctcaggctggaggccggcgatgatgccgaagcggtgtttaacgctctgccagggcaggtattccacggtaaactggtcaacgtattgccggtggtgccagggggacttatcaggcgcagggatcgctgcagtcgctgagcgtcacaccgggtaccgatggcgtgctggcgacgattgaactggatccctatgcgcaagtcgatgcgctgcccgacggcatctacgcccaggtagcggtctattccgaccatttcacccacgtgtcggtgatgaggaaagtgctgctgcgcatgaccagctggatgcattacctctatctcgatcattaatgcgatcggcggcaggttgagaaaacgtcgcgcctgccatttgcctgcgcctgaaccatactgatcttttcgttggcgaaaggagcaggcaatgaaactgatcggcagctacaccagtccttttgtacgcaaaatttccgtcatcttgctggaaaaggcgatccccttcgagtttgtgaacgaattcccctataacgacgtcaacggcgtggcgcagtacaacccgctgggtaaagtcccggcgctgctgaccgatgatggcacgtgctggtttgattcgcccattattgcgcaatatctggaactgctaaacgtcgcgccggcgatgctgcccgaggaacctctggcagcgctgaagatgcgccagctggaagccttgtctgacggcatcatggaggcggcgatcgcgctggtgcgggaaaaagcgcgtccggcggcccagcagtcagaaaccgaactgctccgccagcgggaaaaaatcgcccgcggtctggatatgttggaagggtacgccgccgacggtacctggcgtaatggtgaactgaatctggcgaccattactgccgcctgcgccattgcttatctgaatttccgtcgcgtggctcccggctggtgcgcgacgcggccaaaactggtcaaactggtcgagacgttatttcagcgcgccagttttgcgcgtaccgaaccgccagggagttgacccaggcaggtaacagtttcctcgcgcaggggttacaatcgccactcattgttgactccctctcccgtcgggaggggggaaaataacttatcatcaggttcactcatgtctaccgatactcgcgcgctttatacccggcttccggccattgatcgtttacttcgcgatcccgcttttgctttactgctcgatcgccatggccattcgcaaatcgtggcgctgctgcgtcagatgttggatgaggcgcgggagcatatccgccaggcgcaggcattgccagagtggtgcgacaactggccgcaggagaccgccagtcgactgaatcatagccagcaaagcgcgctgcgtccggtattcaacctgacgggcaccgtgctgcacaccaatctggggcgcgctatccaggcggaagccgcggtgcaagcggtggcgcaggcgatgcgcgcgccggtcacgctggaatacgatctcgacgatgccggtcgcggtcatcgcgaccgggcgctggccgatctgttgtgccgcattaccggcgcggaagatgcctgtatcgtcaataacaacgcggcggctgtgttgctgatgctggcggcgacagccagcgggaaagaagtggtggtctcgcgcggcgaactggtcgagatcggcggtgcatttcgcatccccgacgtcatgcgccaggccggttgtctgctgcatgaagtgggcaccactaaccgcacccacgctaaagattatcgtcaggctatcaatgagcagaccgccctgctgatgaaagtgcataccagcaactacagcattgaaggctttaccaaagcggttgatgaggcggagctggcggaaattggccgcgaatatagcgtgccggtggtggccgatctcggcagcggctcgctggtggatttgagccagtacggtttgccgaaagaaccgatgccgcaggaattgattgcggcgggcgtgaacctggtgagcttttccggcgataagctgctcggtggaccgcaggcggggattatcgtcggcgatcgggcgctgatcgctaagttacagagtcatccgcttaagcgtgcgctgcgggcggataaaatgacgttggcggcgctggaggcgactctgcgcctgtatctgcatccggaggcgctggccgacgagctgccgacactacgcctgctaacccgccgcgccgaagatattcgtcagcagggcgagcgcattcagcctgggctggcggcgcactatagcgattttgacgtgcgcgtcgaagcgtgtttatcgcaaatcggcagcggttcgttgccggtcgaccgactgcccagcgccgcgttaacctttacgccgcgcgatggccgcggcagccagctggaagcgctggccgcccgctggcgcgccttgccgataccgacgatcggcagaatttatgatggccgcttatggctggatctgcgctgtcttgaagatgaaccccggtttatggagatgttattgagatgattattgccaccgccggacatgtggaccacggcaaaaccacgctgctgcaggcgattaccggcgtcaacgccgatcgtctgccggaagagaaatcacgcggtatgactatcgatctcggctatgcctattggccgcagcctgatggccgggtgttgggttttatcgatgtgccgggacatgaaaagtttttgtccaacatgttggctggcgtgggcgggatcgatcacgcgctgctggtggtggcctgcgatgacggcgtgatggcgcaaacccgcgagcacctggcgattctgcagttaacgggaaaaccgacgctaaccgtcgcgttgaccaaaacggaccgtgtggacgcggcgcgggttgccgaagttcgggcacaggtggaatccacgctgagcgagctgggattcgacgacgtggctttcttcgccaccgcggcgacggaaaacctcggtattgccgaactgcgcagccatttgctccagctgacggagcgcgcgcatccgcaacagcagcgttttcgtctggcgctggatcgcgcctttaccgttaagggcgcggggctggtggtgaccgggacggcgctatccggcgaggtaaaaatcggcgataccctctggctgaccggcgccaataaacccatgcgagtccgcgggctgcatgcgcagaatcagcctgttgagcaggcgcaggccgggcagcgtatcgcgctgaacatcgttggcgacgcgcaaaaagaggatctcagccgcggcgactggctactctcggcgcagcccgcagaaccttgcgagcgggcgatcgtcgagctcgcctgtcacgcgccgctcagccagtggcagtcgctgcatatccaccatgccgccagccatatcaccggccgcgtttcgttactggaaggcaatctggccgagctggtgctggatacgccgctgtggctggcggataacgatcgcctggtgttgcgcgatatctccgcccgtttgacgctggccggcgcacgggtggtgacgctgaatccgccgcgccgcggtaaacgcaagccggagtatctgcagtggctttacgcgctggcggcagcgcagggcgacgatgcgcaggcgttggatattcatctgcagcgcgatgcggtgtgtcttgacgagtttgcctgggcgcggcagctgagcgccgacggcctgacggtattaattaaccgtccggattacctgcaggccgggaatagcctgcttagcgcaccgctggccgcccgctggcagaaaaaactgctcgacgcgctggcccgttatcacgaccagcatcgcgatgagccggggccggggcgtgaacgcctgcggcgcattgcgctgccgatggaagatgaagcgctggtgctgttgttgattgaacagatgcgcagcagcggcgtcattcaaagccatcacggctggctgcacctgccggagcataaagccgggtttaccgatgagcagcaggccatctggcagcgcgcggaattgctcttcgccgatgagccatggtgggtacgcgacctggcgcgcgatctgaacgtcgaagagtcgttgatgcgcgcggtgctgcgccaggcggcgcagcaggggatgattacggcgatcgtgaaagatcgttattatcgcaacgatcggattgttgaatttgcgcaattgatccgccgcctggatctgcagcgtggttccacctgcgcggcggattttcgcgatacgctgaatattggccgtaaactggcgattcaaattctcgaatatttcgaccgtattggctttacccgccgtcgtggtaacgatcatcttctccgcgatgcgctgttattccctgaaaataaaaacggcgaataataacgcaaatgaaaaattaagccggtaatgtttaacagtacgttaaaattgaaaatattaacgtactgtttttcatccaatttcttgcctaaaatggcgttcaggtcatgttttttatttcgacatcctcgtacccttccatgatattcacctaaatgaaggaatcatcatggctgcatcgactttttatattccgccagtaaacgttattggcgctggttctgttactgaagcgatgaatactatccagcaatacggatatcgtcgggcattaatcgtcaccgacgcgatgctgaataaattaggtatggcgggtgaagtacaaaaggcgttacaggaacgggatattttcagcgtggtgtatgacggcgtgcacccgaacccaacgactctgaacgtcgaaagcggtctggcgctgctaaaagaaaataactgcgattgtgtgatttccctgggcggcggttccccgcacgattgtgcgaaaggcatcgcgctggtcgcggcaaacggcggcaacatccgtgactatgaaggggtggaccgttcggcaaaaccgcaattgccgatgatcgctatcaataccaccgccggtacggcttccgaaatgacccgcttctgcatcattaccgatgtcgatcgccacattaaaatggcgattgtcgataagcacgtgacgccagttctgtcggttaacgactcctcgctgatgatggggatgccgaaatcgctgaccgccgccaccggtatggacgcgctgactcacgctatcgaagcctatgtttctatcgcagcgacgccgatcaccgatgcctgcgcattgaaagcgatgaccatgatttcacagaatttaactcacgcagtggaagatggcggcaatgaacaggcgcgtgaagcgatggcctatgcgcagttccttgccggtatggccttcaacaacgcgtcgctgggctacgtccacgcgatggcgcaccagttgggcggcttctacgatctgccgcacggcgtctgcaacgccgtactgctgccgtttgtgcaggagtacaactgcagcgttgccgccgcgcgtctgcgtgactgtgcgcaggcgatgggcgtgaacgttgccgggctaaacgacaaacagggcgcggaagcttgcatcgcggccatccgcgagctggcgcgtaaagtcggcatcccggctggtctgcgcgatctgaacgttaaagaagaggatatcccgctgctggccagcaacgcgctgaaagatgcctgcggtttaaccaatccgattcaggcgacccacgaagagattatggcgattttccacgccgcgatgtaatcctaaaaactccccggcggtgatatgccgccgggtgaagcgccattccccccggttttacccaaatttgatgtcgcatttgcctaaaacgttgctgattccattcaggatcaaagcgcgaagcggggcttttctggcacgctgcgtttttatcccgaatggagttgaggatgaaccggtttattatcgccgatgcgcaaaagtgtatcggctgccgaacctgcgaggtagcctgcgtggtgtcgcatcagcaggggcaggattgttctaccgtttctgcgagacgttttacaccgcggatccgggtggtgaagagcgatgagctatcaacggcgacgctatgccgtcagtgcgaggatgcgccctgcgcgaacgtctgcccggaaggggcaatacgccatgaaggcgacgtatggcgtgtcgatcaacggctgtgcattggttgtaaaagctgtatggtggcgtgcccttatggggcgatgacggtgatgttgaccgacgaaggcgtgcaggcgctgaagtgcgatctgtgcgcgcaccggcaaacggggccggcgtgcgtagcggcctgcccgactcaggcattgcgctgtattgagcccgccgagctggaaagattaagcgccgagcgccgccgttgggcggcgcaggcaatgtaatcggatgttcccggtcagtcatggccgggaaacaccatcaggcgtcttgctcctgccaggcgcgctcaatctcttcggcaagaattttcactcccgcctcgattttctcggggtccggcacgtagttcatgcgcatgcactgatgcgtatgcggccacggcttgtccagccccgggaagaagtaatcgcccggcaccatcagcacgccgcgttgtttcaggcgctgataaagcagctcggtggagatcggcagatccttaaaccacagccagaggaaaatcgccccttctggtttatgaatcaggcagcgttcttccggcaaatagcggcgaatggtagcgatggtttcctgaacacgctgataataaaacggtttaatcaccgtctccgatagccgcagcaggtccttacgcttgatcatttcacacatcatcgctggcccaatcccgcccggggcaaggctgataatgccgttcatattgctgatggcggtaatgattttctcattggcgatgataatgccgcagcgggtgcccggcagaccgagcttggataagctcatgcatagcacaatgttcgggttccacagcgggcgcgcttcgctaaaaataatgcccgggaaaggcacgccataggcgttatcaataaccagcgggacgccgtgctgattggcgagggcatccagcttaataagctcttcgtcggtaatgacgttgccggtcgggttggttggccgggagacgcagatcatccccgtctcttcggtgatctgcaaatgttcgaagtccacgtgatacttgaactggccttccggcagtagttcaatgttggggcgggtggcgacaaacagatcctcttccagcccggaatcggcgtagccgatatattctggcgtcagcgggaacagcaccttgcgagtagtgccgtcggcacggcggccggcaaacaggttaaataagtagaaaaacgcgctctggctgccatttgttagagcaatattctgtggctcgatctcccaacctaattcttcacgcagcatttgcgcaagcagggtcagaagctcgcttttcccttgcggaccatcataattgcaaagcgcatcaagggctttgccgttatccagcatatcggccagcaggctattgaagtattcattcatctccgggatttgcgcggggttgccgccgcccagcatgatagcgcccggtgtgcgcaggccgtcattgaggtcttccatcaggcgggtgatgcctgaatgacgggtgaatttgtcgccgaaaagtgaaaatgtcatcgcggatattctgttggtcttctggaaagggaattaccataacgccagcgtcaacgcggtgcaaatcggcacagaagggagcgatttaatttttgttctgctaatagggttaattttagtaatttgtgctgaaaaggctcccgccaacggcaaggagcccggtaagcgtctgctattgctgtccggcccagacaaccataactttatcagcgctgctttcacgtacgaaaccatagccttgtactagcgtcatcgtctgttgtttacccataccaatggccggatggcgggcgcggaattgggcgattttttgccagtgcgcgacgttaccggccgcgttgccggcaacatcctgccagttcatatcggagcgggtaccctgcagcgggtcggagcccgtggggccgaacgggcgcgaagattcatcgccatagaagagttgtacggcgcctggcgcgagtaataacagttccgccgcccgactgccgccttcgcggaaaaggcgggtatcgtgcgaggagagatagctcagcacattgaaatcctggagtttgttcgccatctgctgccaggtggcgtccatgtttgccagacagtccgccgctttcgccgcctgatcctgataatcgaaattgatcatcgcgtcgaagccgtggcgatagtagtcgctttgcattacgccgtgaccccaggcctcgccggtcatccagaatggcgcatcatccagcgctttctgcggattagcttttttccattccgcgagcgcggccgtggcctgcgttttgagctgctgccaggcatccggttcgacgtgtttcgcggtatcgacgcggaagccgtcaataccgtaatcgcgtacccattggctaagccagtgggtcagatagtcccgcggcgtgtagctggctatctctttggcggcggtatccggcttgtgacggtagaaatttggcaagccagaagggagcgtcgattcggttttcaggtccggcaggaacgccagcgacatggtgaaatcgtcgaaacccggattgtcgtagtcgccgatatcggtgcggacccaattttttccccaccattgttcccagcctgctttatcgctgaagttgatgtaatcattgaagctgtgccaactttgccccgacgccggtttccagtcggtccagcgctcgccaagcgtttttttcagttcatcgcctttcagatacagcgagccgaagtgaaattcctgcatatcggcaagcgtggcgtaaccggtatggttcatgacgatatcaaacagaacgcgcatgccgcgccgatgggcctcatcaatcagttgtcgaaggtcggcttcgttgcccatgttggcgtcaagacgagtccagtcctgggtgtagtagccgtgataggcgtagtgggggaagtcgcctttggtaccgccgccaacccagccgtgaatttgctccagcggcgaacttatccatagcgcgttgacgccaagctgttgaagataatccagcttgctggtcaacccctgtaaatcgccgccgtggaaggtgcctatctcctgcataccgtctttatggcgcccgtagctgttgtcgttggccggattgccgttgacgaagcgatcggtcaggacaaaatagatcgtggcgttgtgccagttaaacggcgcgctggcggcgctatccgctgtttcaagcagcagaagtccattactgcctgcggcaggccgcagcgtgattttgcccgctttcaccgtggcgatattaccgctgtaaaaatcgcggacctggcttccttcagcgaacgtttggccgacgtcgagcgtcagtggtttaccatcccattttggacactggcgcagcagcggctgcgtgctggtagtgtccttttccgccagagacagcattagcgttggcgtaccggagcgggtatcgacttccagcgtatagcgcccgtcacggaacacgcgccactgcggcggcgtatcccggcagggttccagcgacagcatctgattgagttttatcgcccccgcaggctgccagcactgttggtcaaaacttatccgcaaagggcgagtacccttcgtcacctcattttgtgtcgtgaagcggcctgcatcctgttcagtgaaggcgggaaagtcagcggttgtccaggcggcaaaggccatcccgggcagcagtagcgaggcaagcgcagcgagtttcatgctggagtcctgttagcggtttttatcacagtgtgcctgcgcgacatcaggttgaactcatcccgccggtaattttgcggggaggatgaaaaggggtgagtgatttagttcaaaaaatgagctataaatgagacggagatagcatttctgcaccttcgcgacggtgcagaaaccgatttcaggtgacagcgattcggaattggactatttctcttgatgctctctctgggtatttttgatactattcgcgattcaactatcgattttttgcgaaaaacaaggtgttggaatgagtaaatccgaccaggagacctaatgatatcgattcccatgcgacgatatggggctgcgatactcatgttacttacctgtatattttcaggtagtgtgttggcgacaacgcacacagcaacaacgagtcataaagcctcagtagttaaaaaagtaaagaagcccagtagtatcaaggttagcagtaaacaagagtattctcgcaatagtgtaaagagcagttcacttcctgatttgcgaaaatacccttccgggacaccaaggaaaaaagcgtttctccggacggttatgccttacattacaaagcaaaatcaagcgatcacggcagatcgtaactggcttgtctctaagcaatacgacggccgttggtcgccgagcgagcgggcgcgtctgaaagatatcgcctcacgctataaagtgaagtggtctggcaatactcgccgtataccgtggaactcgctgcttgagcgcgtcgatattattccaaatagcatggtggcgaccatggcggcggcggaaagcggttggggcacctcgaagctggcgcgcgtcaacaacaacctgtttggtatgaagtgtggcggcggtaactgccgcggtgcgatgaaaggctactcccagtttgaatcggtcgagcagtcggttcaggcttacgtaagaaaccttaacacgcatccggcttattcatccttccgtaagtctcgcgcacagctgcgtaagacggaccaggaagtgactgccagcgcgatgatccacaagctgaaggggtactcgacgaaggggtcgagctataacaactatcttttcgctatgtatcaggacaatcagcgcttaattgccgctcatatgtaatcatcaatgcccggtgcgtaagcccgggcatttttctttcccgctacatcatcacttcactgtgccgatcgcggtactctttcggcgtcacgtcgtactctttcttaaacaccgaatagaaatactgcagcgacggataaccgcacatctgcgaaatttcgtttatcgatagcgtggtggagaccagcaggctgcgcgctttttccagcttttcgctgtggatcaccgtgtggatggtctcgccgacctcttctttaaagcgtttctccagattagagcgagagatgccgacggcgtcgagcacctgctcaaccttgatgcctttgcaggcgtgattgcggatgtagtgcatcgcctgaatcaccgcagggtcggtgagcgagcgataatcggtggatcgccgttcaatgacgcgcattggcggtataagctggcgctgcaacggtagcgcttcgttttccagtaatcgatgcaggagtttcgccgcctggtagcccatctgtcgggtaccttgcgccacggaagagagcgcgacgcgggagagatagcgggtcagttcttcgttatcgataccgatgacgcacagtttttccggcaccggaatgtgcagcagctcgcaggcctgcaggacgtgacgggcgcgggcatcggtcacggcaataatgccggtttgcggcggcagcgtttgtagccaatcggcgagccgattttgcgcatgctgccagttttccggcgcggtctccagcccctgatagaccacaccacggtatttttctttagcgactagctggcagaaagcatgttcccgctctattgcccagcgcttgccgctggacgttggtagtccataaaaagcaaagcggttcacgcctttttctttcaaatgcaggaatgcgctttcgaccagcgcggcattatcggtagcgatatagtggaccggcggatagcattctggctgatggtaggagccgccgacgccgataatcggcactttgacatccgccagcagtttttctatctccgggtcgtcgtaatcggcgataacgccatcacccagccactctttgatgttttcaatgcgcgcgcgaaaatcctcttcgataaaaatgtcccattccaactgcgatgcctgcagatattcgccaacgccttcaaccacctgacggtcataggctttgttggcgttgaataacagcgtaatgcgatgacgcttttcaaacatagatgatattcctgctcttaccccggtcatacaataccggctaatgcccgaattatttcaagcgccttattgcgaagtttggcggtggcgcaagttattcgggcatttttcatattgataccgttatgttctccgcttggtagccgaatccatccagaccgccaacagtaaaatggcgcctttgacgatgtattgccagaaagtggcgacgtccatcatgctcatgccattatccagcgctgacataataaacgcccccatcaccgcgccagcgacgctgcctaccccgcccgccagactggtgccgccaatcacgcaggcggcgatggcatccagttcggcgatattgccggcggaaggcgaacccgctcccagtcgcgaactgagaatcaatccggcaatggccaccatcaggccgttaatcgcgaagactgcaagcttggtgcgctcgacgttaatcccggagaggcgggccgcttccagattgccgccaatggcatagatacgacggccaaaagcggtgcgggtcgccataaacatgccagccagcagcagggcggcgagtatgagtaccggcgtcggcacgccgcgataatcattgagcaaccagatagcgcccagcacgataactgcggtgatggtctgacggccaacggcgccgccagaactggtggtcgccagccctaacgcctgtcggcgcatccgtccgcgccattgccagatgataaaagccgccatgccaataacgccgataccgaagccgatgccgtccggtaaataactttggccgatttgcgacatcgccggcgtggtaggcgagacggtggtaccgttggtaataccgattaaaatcccgcgaaacgccagcataccggcaagggtaacaatgaaagagggtaccttgcgataggcgacccaccatccgttccacgcgccgagcagcagccccatgaccaacgtaacgaggatggtgagcggcagcggccagccgagccaaacgtcgaaaatcgccgccgcgccgccgagcaaacccatcatcgagccgacggacaggtcgatttccgccgaaatgatcacgaataccatgccgacggcgaggataccggtgatggcggtttgccgcaggaggttggaaatattacgcgcgctcaggtaggcgccgtcggtgacccaggtaaagaacagcataatggcgataatcgcggcgatcatcacgaaaacctggagattgagccctttcagcgccgggaaagcggcaggggtggatggggtaagtttgatttcagacgacgtgtttttcgacatggcgttcgctcctcagcgcggcttccatcacctgttcctgggtcagaccttgattatgcaaatcggccttcagcttgccttcgtgcatcaccagtaccctatcgctcagcccgagcacttcaggcagttcggatgagatcacgatgacggcgatgccttgctgcaccagttgattgataagcttgtagatttcgtatttcgcaccgatatcgatgccgcgggttggttcatcgaggatcaaaatgcgcgggttgagcagcaggcagcgggccagaatcgccttttgttgattgccgccgctcaggcgaccaatcgccagatccggcgatgacgttttgattttcagccgctgaatcgattgctgaatgcagtgctgctctgcggcgtcgtcgaggctgctcgccgggccggtgaactggtttaacgccgcgagagtgatgttcttgccgactgccatcaccggcacgatgccgtcttttttgcggtcttccggcaccatggcgatgccatgggcaatcgcctgttggcagttgttaatcgtcaccggctgtccgtcgataaagatgcttccctgccagcgccccggccagacgccaaacagacactgcaccgcctcggtgcgcccggcgccgactaatccggcgatgccaaggatttcgccgcggcggagggaaaacgacacgtcgttgacgcgcttgatatgacggttaaccgggtgccaggcggtgagatgttcgacccgtaggatctcatcaccatggctatgcggttcatttgggtacagcgccgtgagctcgcgcccgaccatcatagtgatgatgtcatcttcattcatcccactggcgtcgcgggtgccaatatgctggccgtcacgtattacgcagatagtgtcggagatggctttaacttcattgagcttgtgcgaaatataaatacaggcgatgccgtggttttgtagatcgcgaataatcgccagcagcgtcgcggtttcttgttcggttaacgatgccgtgggttcatcgaggatcagcaaacgtacctgtttatttagcgccttggcgatctcgaccagctgctgctgacccaggcctaaatcgccaacgcgtgtatccggcgagatcgatagattcacttgcgccagtagcttttggcagcgcagggtcatggtttcgtaatccagcagtccatggcgtgagatctcggtgccgagaaagatattttccagcaccgtgagatgtttcaccaacgccagctcctggtgaataatggcaatacctttacgctcggtatcgcgaatatgattcgcctgtaacgtctcgccagcgaaaataatttcaccttcgtagctgccgtgcggatagatgccgcacagcactttcatcagcgttgatttcccgaaccattttcaccgcataacgacaccacttccccggcattcagccgcaggctgacgttatccacggccttaaccgcgccgaaggctttggtgatgttcttcatttcgagtaaccaggacatagagactccgcaaaagcgatatccggcaggacgaaaatgacgccccgaggcggggcgtcagccattacagttcactctttttgtggaaaccgtctttaatcaccgtagcgtcaatattctctttattgacttcaattggcgttaacaggcgcgaggggacatcttttaagccgttattcaacgtggcgtcagccttgggttgttggtcattacctaattcaacggcgatttcggcagcgctagtggcaagcgtggtaatcggtttataaacggtcattgtctgggtgccggaaataatacgtttcacgccagccaaatcggcatcctgcccggaaatggcgactttacccgccagcccctgggcgcttagcgcctggatagcgccgccggcggtcgcatcattggaagccactaccgcgtcaattttgttgttattcgccgtcagcgcgttttccatgatttttaacgcgttttccggcagccagccgtcgacccactgatcgccgacgatcttaattttgccgttatcaacataaggtttgagcaccttcatctggccggcgcggaacagtttggcgttattatccaccggcgagccgcccatcaggaaataattaccctgcggcactttgtcgaccaggctttgggcctgcatttcaccgactttttcattatcgaaagaaatataaaaatcgatgtcagcattattaatcatgcgatcgtaggcgaggactttaattccctcctgtttcgcttctttaataacgttgctgagcacctggccgttgtaaggaataatcactaaaacatcgacgccgcgattgatcatattttcaatttgcgacatttgcgtttcttcgttgccattggcggattgcacaaatactttggcgcctaatgattccgctttattgacgaaaatatcgcgatctttttgccagcgttccagacgaaggtcgtcaatggccatcccaatcttaacttctttagccatacccgccatgctggcgagaaggagcgatgaggcgcagagcgtaaggcaaaggttctttatcttcataataacgataccttttcaaagggtaggtaaggcgtacaggaataaacttcaggttgcagatacgttgcagattcttaacggggaagcgagggctggcaattatctgttcttattttcgcattatgaaatttagtttgttttgtaatttatgaccgtgatcgtattttattcaagagtatgcagattatttcatttcacttccatcataggattccagaaatgatgcggagaggaattatttttgcgagctggcgcacgtttgtggattctctcaatggcggtgtgaaataacgtaattgaggaaggcgaaagtggaattctatattgacgtataacttgttactcgccgcaccctgaatatggagttctctatgcagacctatttcgatcaactcgatcgcgttcgttatgaaggcccgaaatcgactaacccactggctttccgtcactacaatccggatgaattagtactgggtaaacgcatggaagaccacctgcgtttcgctgcctgctactggcacactttctgctggaatggcgcggatatgtttggcgtggggtccttcgatcgcccatggcagcagccgggcgaagcgctggaaatggcgaaacgtaaagccgaagtggcatttgagtttttccataaattgaatgtgccgtattactgcttccatgatgtcgacgtttccccggaaggcgcttcgctgaaagaatacagcaacaacttcgcgcagatggtggatgtactggcggaaaaacagcagcagagcggcgtgaaactgttgtgggggacggcaaactgctttaccaacccacgttacggcgcaggggcggcgacgaaccccgatccggaagtctttagttgggcggcgactcaggtggtcaccgcaatgaatgcgacccacaagttgggcggtgaaaactacgttctgtggggcggtcgcgaaggctacgaaaccctgcttaataccgatctgcgtcaggagcgcgagcagattggccgctttatgcaactggtggttgaacacaaacacaaaattggtttccagggcacccttctgatcgagccgaagccgcaggagccgaccaagcaccaatatgattatgatgcctccacggtttatgggttcctgaaacagtttggtctggaaaaagagattaaactgaacattgaagccaaccacgccacgcttgccggccactctttccatcacgagatcgccacggctattgcgctgggcctgttcggttcggtggacgcgaaccgcggtgatgcgcagctgggctgggataccgaccagttcccgaacagtgtagaagaaaacgccctggtgatgtatgagatcctcaaggcgggcggcttcaccaccggcggcctgaactttgatgctaaagttcgtcgccagagtaccgacaaatacgatctgttctacggccatatcggcgcgatggacaccatggcgctgtcgctgaaagtcgcggcgcgcatgattgaagacggcgagctggataaacgggtggcgaaacgctatgccggctggaacggcgaattgggccagcagatcctcaaaggccagatgaccctgactgatattgcgcaatatgcgactcagcataacctggcgccgcagcaccacagcgggcatcaagagttgttggaaaacctggtgaaccattatctgttcgataagtaataccgacaaaagtgcccgctaaaaccgggcactggctgtaaaccatttttgctgcgccacgctttgccgtggcgttcgcgttaaggagacgctgcatgtatatcgggattgatttagggacctcgggcgtaaaagccattctgctcaatgaacagggcgacgtactggcgacgcataccgaaaaactgaccgtctcgcgtccgcatccgctctggtccgaacaagatcccgaacagtggtggcaggcgacgaataccgcgatgcaagcgctgggagcgcaacactccctgcgcgaggtaaaagccttagggattgctgggcagatgcatggcgccacgctgctcgacaaacagcagcgggtccttcgtccggcgattctgtggaatgatggccgctgcggcgaagagtgcatgctgctggaagaaaaagtcggcgctgcgcggcaaatcaccggcaacctgatgatgccgggttttacggcgccgaagctgctgtgggtacagcgtcacgaagccgaaatctttaaacaggtcgataaggtcctgttgccgaaagattatctgcggctacgcatgagcggtgagttcgccagcgatatgtccgacgccgccggcacgatgtggatgaatgtcgcgcgacgcgactggagcgatgagatgctcgccgcctgcgggctcggccgcgacaatatgccggccctctttgaaggctgtgaagttaccggccaactgcgtgctgaggtggcacaggcgtggaatatgccgcgggcgctggtggttgcgggggcggtgataacgcggcaggcgctgtcggcgttggcatggccgatgccggtcaggcgatgttatcgctggggacctccggcgtctatttcgccgtcagtgatggttttctgagtaaaccggaaagcgcggtgcatagtttctgccacgcgctgccgggccgttggcatctgatgtcggtgatgctcagcgccgcgtcttgtctggattgggcggcgaagttaaccggccttggcagcgtaccggcgctgatcgccgcggcgcagtcggcggatgacaatgccaacccggtgtggttcttgccttatctttccggcgagcgtacgccgcacaacaatccgcaggctaagggcgtgtttttcggccttacccatcaacatggtcctgcagaattggcgcgggcggtgcttgagggggtgggttacgcgctggctgacggtatggatgttgtgcactcctgtggtgtgaaaccagacagcgtcacccttatcggcggtggcgcgcgtagcgcatactggcggcaaatgctcgccgatatcagcggacaacagctggatttccgcaccggcggcgatgtcggcccggcgttaggcgcggcaaggttggctcaactgggcgtacatcacgatgcggctttctctgacctcctgccgcagctaccgctggagcaggcgcacctgcctgatgctcaacggtttgcccgttatgcgccgcgtcgtgaaacgttccgtcagatctatcagcagcttaagccactgatgtcataaggtgttctcgccccattttttgggcgaatttcctttctgaatggttcactttgcattgatttaattaacatatttatttattccgaattgtgggtttcaactcgctgaaactaccgcaaccggcaaatccccggtcataatgagcgttaccatggccagggaggcgcaatgaaattaaaacgaacgacggcaagattagtcatgttgctgggctcgctggtttacttaatcggtatctggcggacgtgcccgctgttcagcggtaaaggctattttcttggcgtgctggtgatggggatgtttgctgtcctcacgcatcaacgaacggagcaggaagcgcagcgagatgatgaatttatctccttgtgccggttggttcttttgttatcggcaggattgttgctggtcggcgcctggtttgtgccagcgccgtggcgtgaaaaaagtatttacgtgatggcatggtttgtctgtatgtacggcgcgtcagcaacaccttatcccgctaaagtcgcggataaagcgcgcaataactcagtggaataaactgtcaaccgacggtgaagagaggtcgtcggcaatggaaacaaaagcgacgacctattcacccgcgtttcatctgatttcatagatttcgctggttggtgattttcagctcaccaaccgatggcgatccattcgctgaaccagtatagacagcgccaggctacccaacagcgcggcggcgaaaatccaaataatatctaacaacggccagcggctgagctcaaggccgctggcgcgcagagcgtgaataaacaacgcgtgaaagccataaatacctaatgagtgcctggagattaacgcgatacccgggagctcgcggttattgaggatgtttttgcccagggtgagtaacgagatcgcgcaaataaacactgccggcccgcaatacagataccaggtatcgccaaaatcacctcgccattgcagttcatgcagcgtgccgcgtgaaatgacccacacggcggcggtaaacagcagcgcgcacagcagggtcaatcctcttctgtcggtattcatggcaccgatcgcccggcccaatactccgtacagtacgtagtaaaaggtatcgccgttgatatagagatttatcggtagccattcaatgccgccggctttaatgcttaccgtattggggttagcgatgaggccaatcaccagcatcagcgccagcagcattttgccgctgacctgcttcacctgaatcagcggcgagagcagataaatcaccacaatagcaaagaaaaaccacaggtgataaaacaccggtttttgcagtaaattttttaatgatagctcaacgttgatatgggtaaacagggtgatatagagcagcgccagtgcactatagaacaggatacacatcacgatgcgcagaaaatggcgcggctgggcgctgcgttcgccaaaaaacagatatcctgaaatcatgaaaaaaagcgggacgctgacgcgcgatgccgagttaagcaggttcgcaatatcccactcaaacaagctgatgctatgagggtgggtaatgtaccaggtggtactgtgaatcatcactaccatcagacatgcgatgccgcgcaagttggtaatccagcttattttttcctgcatctgtacctcattggcccctgcgtaaaaagagtctgactcccgtcgtttgtcgtcattacaatggaatattctgagtttttcgccacactcttgtagagcatcggtgagattcgcaaaatatttggctagttttacatggccttcacgataacaattggctaacaaggcggttgagaaaaatggtgatgaaatctttcgtttctaccatggtgatggtactgctggtcggctgcagccagacgcctgctcaacccgtgcagaaagcgcaaaaagcgcgtatcacgccacaaactacgctgaatatggaaaagctatgcaaggatcaggcggccatacgctacagtaccgatacccgtcgtgtcgatatcaatcatttcgagcagttccaggcaagctatgagctttcaggcctgacttcgcggaatgagcgttttatctgttcttttgatccggacggccagtttttacatctttctatgcgctgaatgcggtctacatgccgcatgatggcgccgctttgctcaaatttcgctaaacaaaggcgtttcatactgtatatctcgcagccagcgggtatactgatcccttcctttaaatccacacgtatccagcacgaaataatatgcaaaagtttgataccaggaccttccagggcctgatcctgaccttacaggattactgggctcgtcagggctgcaccattgttcaacctctggacatggaagtcggcgccggcacatcccacccaatgacctgcctacgcgcgttgggaccagagccgatggcgaccgcctacgtgcagccttctcgtcgcccgaccgatggtcgctatggcgaaaacccgaaccgcttacagcactactaccagtttcaggtggtgattaagccgtctccggacaacattcaggagctgtacctcgggtctttgaaagagctgggtatggatccgactatccacgatatccgcttcgttgaagataactgggaaaacccgacgctgggtgcctgggggctgggttgggaagtgtggctgaacggtatggaagtgacgcagtttacgtatttccagcaggttggcggcctggagtgtaaaccggtcaccggcgaaattacctacggcctggaacgtctggcaatgtacatccagggcgtcgacagcgtatacgatctggtctggagcgatggcccgctgggtaaaaccacttacggcgacgtgttccaccagaacgaagtggaacaatccacctataactttgaatatgcggacgtagacttcctgtttacctgcttcgaacagtacgaaaaagaagcgcagcatctgctggcgctggaaactccgctgccgctgccagcctacgagcgtattctgaaagccgcccatagctttaacctgctggatgcgcgtaaagccatctccgtcaccgagcgtcagcgctatattctgcgcattcgcaccctgaccaaagcagtggcagaagcttactatgcttcccgtgaggcccttggcttcccgatgtgcaacaaagataaataagaggcggccatgtctgagaaaactttcctggtggagatcggcaccgaagagctgccaccaaaagcactgcgcagcctggctgaatccttcgctgccaactttactgcggaactggacaacgctggcctcgcgcacggcgccgtcgaatggtttgccgcgccgcgccgtctggcgctgaaagtggcgaatctggccgcctcgcagccggatcgtgaagtcgaaaaacgcggcccggccattgcccaggcgtttgacgctgaaggtaaaccaagcaaagcggccgaaggctgggcgcgcggctgtggtattaccgtcgatcaggctgaacgtttgaccaccgataaaggcgaatggctgttgtatcgcgcccacgttaagggtgaaagcgcgcaaacgctgctgccgaacatggttgcgacctcgctggcgaagctgccaattccgaaactgatgcgctggggtgcttctgacgttcacttcgtgcgtccggtacacaccgtgaccctgctgttgggcgatcaggttatcccggcgaccattctgggtatcgcttccgaccgtatcatccgcggacaccgttttatgggcgagccggaattcaccatcgacaatgccgaccagtatccgcagattctgcttgagcgcggtaaggtgatggcggactacgctgagcgtaaagccaaaatcaaagcggatgctgaagcggcagcgcgtaaaattggcggtaacgctgacctgagcgaaagcctgctggaagaagtgacctctctggtcgagtggccggtagtgctgacggcgaagtttgaagagaaattcctcgcggtgccatccgaagcgctggtttacaccatgaagggtgaccagaagtacttcccggtctacgctaacgacggcaaactgctgccgaactttatcttcgtggcgaatatcgagtccaaagatccgcagcagatcatctccggtaacgagaaggtcgttcgtccgcgtctggccgatgccgagttcttcttcaataccgaccgtaaaaaacgtctggaagataacctgccgcgtctggaaaccgtgctgttccaacagcagttgggaaccctgcgcgacaagaccgatcgtattcaggcgctggcgggctggattgccgaacaaattggcgctgacgttaaccatgcgacccgcgcgggcctgctgtccaagtgtgacctgatgaccaacatggtcttcgagttcaccgacacgcagggcgtgatggggatgcactatgcgcgtcatgacggcgaagcggaagatgtcgcagtggcgctgaacgagcagtatcagccgcgttttgccggcgatgcgctgccgtctaacccggttgcctgcgcggtggcaattgccgacaagatggacactctggcgggtatcttcggtatcggccagcatccgaaaggcgataaagacccgtttgcgctgcgccgcgccgcgctgggcgtgctgcgcatcatcgttgagaagaacctgaatctcgatctgcaaacgctgaccgaagaagcggtgcgtctgtacggtgagaaactgactaacgccaacgttgttgatgacgtcatcgacttcatgctgggccgtttccgtgcctggtatcaggacgaaggctacggtgttgacactatccaggcggtactggcgcgtcgtccgacccgcccggcggatttcgatgcgcgcatgaaggccgtttcgcatttccgtacgctggaagagtcctccgccctggcggcggcaaacaaacgcgtatccaacattctggcgaaatctgacgagaccctgaacgatatcgttcatgcctcggtgttgaaagaagcggcggaaattaagctggccggtaatctggtcgtgctgcgtgataagctgcagccttatttcgccgaaggccgttatcaggatgcgctaattgagctggctgcgctgcgcgagccggttgatgagttcttcgagaatgtgatggttaacgctgaagacaaagatgtccgcatcaaccgtctgacgctgctgtcaaaactgcgcgagctgttcctgcaggttgcggatatttcgctgctgcagtaactatctcgagaaaggtcaaaagcctgccatccggcaggctttttttttgccttatcgccatgatgaaaaaataatcttgaaatccaggctcaggcctggctatcctatgccccgacgaatccctcgtctcactggagcgcacacgacaaatgaacaaacacgactgatgaatttcatgccttacctcgcaaacgctgcgggtaggggagtattgatttcattcaggagtgcttatggctcattgtgcccacacccctcttttgttttacatcaggtcacctgtcagttcgcgacgggacagacgctttttggcccgctgaatttatcgctggaaccgttgcgttgcggcctcgttggacgcaacggcgttggcaaaacacgcctgttacgtctgctggcgggcctcgattctccctccggcgggcatatcgaacgatcggccaccgttgcctgggtggcgcagcagccgaccctcacggccgggacaaccgttgcctccctgctgggttatgcgccagtatttgacgccttgtcccgccttgaacaggggaaagggctggcagatgactttgaactgttagatggccgttgggatctgcccgatcgcctgagttcagcctttcgcgatgccgatctcccggcattctccgccgatcgtcccgctttttcgctcagcggcggcgaacgaatgaaggcgctgctgtgcggcgcattcgtttccggcgcggactatctgctgctggacgaacccacgaatcatctcgatcgtcagggccgggagtggctgtatcagcagctggaaatctggcggggcggggcattaatcgccagccacgaccgtgaattactggctctgatgtcgaggattattgagctaacgccggcggcgctgcgcagctacggcggtaattatgccgaatatcagcggcagcgcgaagcggagcaacaggccgcccgctcggcgctggagcatgccgcaatcgaacggcggcgcacccgggcgcggatgcaaaaggagcatgacgcggcccaacggcgctcggctcagacgctgcgtaccgtcgatacgctgaatatcgcttcttttgaacgcgtgaagtacaaaggggcggcaaaagagcgtccgggaacgctgcgccgccagcatcgtgagcagaacagtagtctgaatgccgccgtgcagcaggcgcgggagcgggtagaagaagataatccggttatgttcacgctgccgggcagtgaagtggccgccggcaagcaggtactggtgctggaatcactgcagttagctcactcatccaccgccccgctcgactggcgggtggatggcccgatgcgtatcgcgttgaaggggccaaacggctgcggcaaaacaacattattgaaaaccctgatgggactggagcaggcaatgtctggtgatgttcatctttcggtgagcgcagcgtatctcgatcagcatctgacgcagctggatttatcattgtcggtgatggagcaccttaacctgggcgataccccactggatgaaggagtactacgtagccgcctggcgcagctacagttgggagctgacaaagtcagccttccgctggcggcgttaagtggcggcgagcgactgaaagcggcgcttgcctgcgtgctctggcggcgggactcaacccaactgctgctactggatgagccaaccaatcatctcgatctggcttcaacgcaggcgattgaaagcgcgttggcggcttttcccggcgcgatgttggtggtatcgcatgacgaggcatttttacaaggcctgaagctgacccatagtctggagtggcgggaaacgggctggcactttgccgccctctgaatgttaacaggcgccatctgctgatggcgcctgttaacgacagataaaaaaaatccccgccataaggcagggatttattattcttagcggcttgaacttacagagaagttacgttgccagctgccgggcctttagcgccgctttcgatggtgaaggaaactttctgaccttcgtccagggatttgtagccatcgttctggatagcagagaagtgtacgaacacgtctttagagccatcgtcaggagtgatgaagccgaaacctttgtcagcgttgaaccattttacgataccagtcattttaccggacatagtgaattacctttaaaaaaattagtgagccttgcggcgtagtggtctggactacagatttaaagcgataaagggaaagttcactacggggatatctaatggataacctttgaaggactgctctattcgactgctctgtggtctgtacatcaaacctgcgagcattaacgcatgttctctgtcggatagcaaactttttttcatcaggatataaaacggccctgaagcaggaccgttaccaaaagaagatagtaaaccagtttttcaatctattagctgccttgagagctgcggattggccatcatcaggcgcatcagtttgagttccgtggatgacggttttacccgtcgcgactcccattcttcgaccattgcgacgctcacgcccatggcattggcgaaatcatcggtcttaagtcctgtgcctttacgcagccgttcaaattcattaaaaacgcttgggtacgggcaagcgtagccgtttgcggctgatttttaaaaacaatttgttccaggttactcaacaaatcaaatacgggatctttatattccattgagagctcctattctgtctcactgcggagaggaaaatacatcgagccatttaagaatagtcgcaaaagcaaggaaaataataactgctgtgattatttgtcggcgtggtttcgttaatcacccggaaaagaggcgtgcgtaaaagctaaggtgatgattcctaacatcgacagcggctttagaaaatttatgtaaatgatggttagcggcaagaaaaagccagcgcagagcgctggctggattgattaggctttttgtaaattcttgctgtcattttcgctgacgcctggctggcgctggctcattttgtatttcaccagtagagcgatagcggataaaaacgccgggatcgccagcatggtgaagatggtttcaaacgacaattgcgcctgcatcaggaaagcgccgctgaaggcgccgaggatcccgccgaagcggccgataccgagcatccaggcaacgccggtggcgcggccctgggttggatagaacccggcagccagcgccggcattgatgattgcgcgccgttcataatgctgccagcgataaacaccattaccccatcaacagcagattgctggttgagaaacccaccaggcaaacaaagacgccggtgagcagccagccgacggcaaccaccttgttagggttgatcttgtccattagcgcgccgaggatcagcacgccaatcccgccgccgagcgggaacagggcggtgatgatagaagcctggctcatcgaggcaccggtctcgcggataagcagcggcagccaactggtcagcagatagaaaatcagtaatcccataaaataggtcaggcacagcatcacggtgcccacagcgtagcgcggggagaaaatcacgccaatggctgacttttccttcacctggcctgcttcacgtagctcaaattcaaccgcttccggcagcggtgcgatacgcttcaggatagcggcgatgcgatgcgccggctgccgtttcacgaccatatagcgagcggattccggcagcaggaacattaaagccacggccagcagcagcggcatcacgccgccaagtaccagcacgctttgccagccataatgcgggatcatccaagccgacagaaagcctcccagcgacgaccccattgggaagccgacgaacatcaggtttaccatcagcgcgcggcggcgttccggagcatattcgctcattagcgtcgcggcattcggcattgccgcgcctaagcccaatcctgtgaggaagcgcaataatgtcagttggttaaggctggcggcaaatgcggttaataaactaaagccgccgaacaccaggatcgacataatcaacactttcttgcggccaatacggtcggcgagcggccctgccgtcagcgcgccgacggcgagcccgaccagagcggcgctcattaccgggcccagcgcggatttctcaacgccccattcctgcaccaggtctgaagcaataaaaccaataatcgcggtatcaaatccgtccatcgcgacggtaataaaacataaggcgagaatcatccattggtacttcgtgaatggatgttcgttgataaaagcctgaatatcgatggttgttttcttcatacggcattcctggcaggctgagcgggggacagaggtattgttatagtctccctcgctgtcattgatgttgtttgtgcgataatcgaacataacgccgttaatcgctcattaatcaaaccattgaacctgcctgtagacaatgtgccgccttcaggaagcgtgcgattatcgtccgctttgcgtaattccttcgccggtaattttattaattttaattaaatcaaaaagatatttactattttttgggcttaagttatcgcgttaaatgtgatgaacttaacagcgaggctggctggtgccagagaggcaaaaaagggcgttttccgcggtaagattatcaggaaaaggtatcctgcaaggccgtcctggactatccttgtcagcgtctggcacgcgtgtgcctgtttgcgctttttttggctgaaggagtaaaaaaatggcgacaggaaagtcctgctctcgctggtttgcggccgttgcggccatattaatggtggttagcctgagtgggtgttttgataaagaaggcgatcagcgcaaagcgttcatcgacttcctgcagaatacggcgatgcgtagcggcgaacgtctgcctacgctgaccgccgatcagaaaaaacagttcggtcccttcgtttccgattatgcggtgatttacgcttattcacagcaggtcagccaggcgatggatgcgggtctgcgcccggtggttgatagcgttaacgccattcgcgtggcgcaggattataccactcagcgtgaaccgctgcgtcaggctaacggcgcgctgggcgtgctgagccagcagttggaaaacgccaaaatgcaggccgatgccgcgcatggcgccctgaagcaggctgaagaccttaagccggtttatgaccaggtgtttaataaagtcgtgacggcgccggcgaatgcgctgcagccgctgattccggccgcgcagatctttactcagcagctggtccaggtgggtgattttgtcgctcagcaggggacccaggtgagcttcgtggccaacggtattcagttcccgacgtcacagcaggcgagccagtacaatgcgctgatcgctccgctggccgctcagcatcaggcctttaatcaggcctggacggcggcggttaacgccacgcgttaatcagtatatcgctgttctcccggctgacggcgtaagcgccgccggccgggcttctgctttcctcgcttacttcacctgcgggttcacgcagttcttctcaaccttgccgttcaatgcgtcaatcaggttatctaccgcgcaggccgccatgttatagcgggtttcgtgggtggcggaaccaatatgcggtagcgcaactacgttcggcagcgtcagcagcggcgaatctttagccaatggttcatgttcaaagacatcaagaccggcggcgtggatctcaccggcctgcagcgccgcaatcagcgcctgctcgtcaacgaccggaccgcgtccggcgttaatgaagatggcggaagatttcattttggcaaactgcgcttcgccgaacaggtggtgggtctcttcgctcagcggcaggatcaggcagacgaaatccgcttcctgtaacagggtatcgagatcgcagtagcgcgcattgaagcgctcttccgcctgcggatgctgccggcgagcgttatatagaatcggcatgccgaaaccgaagtgggcgcgctgcgccagcgccatgccaatgcggcccatgccgacgatgcctaaggttttatggtgtacatcgcagccgaaccagtccggcccgatgcttttggtccattcgcccgctttcacgcgttcagcgacctcaaccacccgacgcgcggtgctcagcaccagcgccatcaccgtatcggcgacggtttcggtcaacacggtcggcgtatgcatcagcaaaatcttgcgcgcgttcaatgcatcgacatcaaaattgtcgtagccgacagacacggtagaggtcgcacgcagcttcggcattttctccagcaacgcggcgtcaaccttttcacttgaacccagcaaaccttccgcctgggcgaaagcctccgcgttctgcgaaacggtttccggacgcaggtttttcacctgggtgacggaaaagtgttcctccagacgatgtaacaggtcgtcggggagcgttttatagagaatgacagacggcttcatgcgaatctccgtagcgtaagtagttcaggcgtgatgagcgccaagcggaagtttttgattcttagcaggcttaacaattaaagtaagccataccgaggcgaaaagcgccacacccatgaaaatgtacgaggcggacgggctgccggttgcgccgttgagataaccgacgaaccacgaaccaaagaaagaacccagcgctcccatactgttgatcagcgccatcgcgccgccggcgacgttgcgtggcagcatctccgggataatcgcaaagaacgggccgtacggggcatacatggccgcgccggcgatcaccaacagggtataagagacccagaaatggttggcgccgacggcccaggagccgatgaacgccagcccgccaatgagcagcagcggccagacaaacagcttacggttctgcatcttatcggaagcccaggagacggcaatcatcgcaatcgttgccgccagatagggtactgaagagagccagcctacttcgaccatccccatgttttcgccaccgctgcggatgattgacggcagccacagtacgaaaccgtacacgccgatgctccaggcgaaatattgcatacacagcagtaccacgttgcgtgaacggaaggcttcgccatagttacgcaccgctttgataccctgctgttcacgctccagctgttcctgcagcgccgctttttcactttccgccagccaattcacctgcgacggtttgtctttcaccagtacccaccagcagaaggcccaaatcaccgcagggatcccttcaatgataaacatttcacgccagccaaaggcctggatcagataacccgatacgaccgacatccacagtacggtgaccgggttgccgaggatcaggaaggtgttagcgcgtgaacgctctgatttggtgaaccagttactgatgtaaatcagcatcgccggcatgaccgccgcttccaccacaccaaggataaagcggatggccgccagcgccgggatgttatgcaccacgccggtcagcgaggcgcagccgccccacagaatcaggcagataaagataagtttacgcacgctgcggcgttcagcgtaaatcgctcctgggatctggaagaagaagtatccaagaaagaaaagggcgccaagcagcgatgagatgcctttggtgatgccaaggtcttcggtaatgcccgcggccgatgcaaagctgaagttggcgcggtcaaggtacgccaggctatacgtgataaacacgataggcatgatgtaccaccaacgttttgctgcatttgttgaactgttcataggcttgcctctgtcaatgaggtgacatacgcccgccgggacgggcgctgctgtgccgcgctgcatgtagggtacaggacggctgttttaggtgaaaagattattcgcccagcgcttcgcgggtgggcagcccttcgctatcgccctgtacctgaatggccagcgagccaattttgttgccgcggttcacggcttgcgtcagcgttttgccttccagcagcgcgctgattacgccgacggcaaagccatcgcccgcgccgacggtgtctaccacgttgtcgactttaatcgcggcgatggcgccctgttcaccgtcggcggtcttgaaccatgcgccgtcgcagccggtttttatcaccaccgccttaacgccgcgagacagatagaaatcagcgataccttccggcgtctgctgaccggtgagaatgacgccctcttttaagcctggtaaaacccaatcagcctggaaggcgaggcggttcagtttctccaccatctcggcttcgcttttccacagtaccgggcgtaggtttgggtcaaaagagagggttttaccttcggctttcatcaccctggccgcatgttccagcaatgcatacgagctgtcggacagcgcggcggcgacgccgcttaagtgcaaatggcgggcgctggtgaagtaatcagcgcggaaatcttccgtcgacagatggctggcagccgatcctttacggaaatattccacaatgggatcggttccattttcgactttagatttcatctggaagccggtagcgtagcgctcgtcaatggccacgccgcgcgcatcaataccttctttggccagcgaattcagcacgaagcggccaaagctatctttgccgacgcggctcacccagcccaccttcagtcccaggcgtgccaggccggtcgccacgttcagttcagcgccggcgacgcgtttgataaagcgttcaacttccgccagttcaccggtttcggtggcgacaaacatcgccatggcttcgccaatggtaatgacatctaagttttccatggcttaatcctcgcgtaacagatcaacgtaatgacgggtgacggcggtcagatcgtcgccgaccagcgggaattcaataccgcgcggcgcgtcggcgggcaggttatcgagcagtgccagccagcgagcgtccgcctggtccggtgggacggcgcgatacttctcatgatgaggctccgccgccttcacatgaatatagctgactgcgggggcgaggtagcgcgcggcttcttccggcgaatcgccgacccacagccagttccccatgtcgaaagtcagcgtcaccggcatctgatggacccggcaggcggctttgaaacgctgcatcggcgccagttggccgcaatcggtctggtcattttccaccaccagcgccatgccgctggcgctcagaatgtcgcgcagcgtctccagttgttgattatggatgaaatggccgagggagagcttcagccacagggcgttgagggtttgcgcttcttcaagtaacgacgggagatggggattgagttcgccgttgtcggcgaacagcgcttgcggcgcggagtagcaagccagcagaccctgtttttcaatgtcggccgccagcgtcggcaactgcttcagttccgccgcgctgaacaactcgcggcgaatttccacgccatcggcgccggaaccggcgataaagggtaatacggcggactgcccgccaagcgctttaacgtggtcgttgccataagcggcggtgacgacaatgatttttctggccattgaacaaactcctggcgtggtggggcttaactccctattacgctagatggtaccggttccaaagaaaaggccaggatgtttaatttatgatcgtcatcacgatgaatcgttaacgagacgttgatccccggacaataagctcgccggagaagacccgctcgcagatggggtcgcggccgccttctatacgcctgacgacctgttcgaccgcggcgtagccaatctgccaggttggctgtttgagagtggttattccgacgcctgccagctccgcccattccagctcatcgaaacccagcaggccgatatcgctgccccagatgaggtcaacgcgcttcagtgaacgggcgacctgtaacgtcagggcgccattggcggaaatcaccgctttgcgcataccgcggtggcgggcgtggaactggcgcaggacgttatccatcatggcgccgtcgttgagcggcacctcggcgttttccgccaccacgccagcatagcgctgtagggtcgcgcgaaaggcgtccaggcgctcgcggcgggtgtttacggagccgattggctcgcttaaaaacagcagcgcttcaaaacccttttccaccagatgttcggtggcggtggtggcggcctgagtgttatccagccccacgacatcacaggcgaaatcggggattttacggtcgataagcaccatcggtagcgaggattgctgcaggcggttgagaccttcttcgcgcatgccgaccgcattaaccacaattccttcaacctgatagctacgcagcaggtcaaggtagtgcagctcctgatcgacctcattgttggtattacataccagcagggtgaagcctttttcgcggcaggcggcttcaatcccacttaacacgttcacggagtaagggttggtgatatcggcgatgatcaggccaatcaggcgggtacggccatgtttgaggccacgggccatcaggctgggacggtagttgagctcggcaatcgctttttcaatccgcgccagcagatcgtcggaaagcagatgcttttcgccgttgaggtagcgtgaaatgctggttttaccggtcttcgcggctttcgccacgtcgctgatggttgctcgcgccgctttcgccatgatggcttcctttgctgaaaatctgccaacaccttagcgcgaaaaatagcgatatcaagcattttgcccggcagggaggctgccgggccggaaacgagaagattactgcagcgggctgagggtaatttccacgcgacggttctgcgctttgccttccgccgtgctgttgctggcgatcgggttcgccgggcccatgccggtggtgcgaatacggttagccgccacgccctgcgtgatgagcgcgctggcgacgctgtcggcacgctgttgcgacagacgcatgttgagatcgttgctgccggtgctgtcggtgtagccgacgacgttaacggcggttttctcgtactctttcagcaccatcgcgacgccggtcagggtgttggcccctgcaggtttcaggttggcgctgctgctgtcaaaggtgacgttgttcggcatgttgagcacgatgttatcgccatttcgcgtcacgctgactccggttccctgcattttttcgcgcagtttcgcttcctgcacgtccatgtagtaaccaatgccgccaccgagcgccgcgcctgccgctgcgccaatcagcgcgcctttgccgcggtcatgcttggaagaggagagcgcgccgacgcctgcgcccactaaggagccgatacccgcgccgatgccggattttcccgcttcgcgttcgccggtataagggttggtagtacaaccagaaatagccagtgtgccgctaacgatagcggcaatcatgagtacgcgttttttcatcttatttccttaatcctttttattctttgccaccgcaagcgtgacggttgattatgacgtccgaatacggagaaaattccccgcagggtatctctttttgtaagtaacattgaacggttgacgaacaaaccgtcacaacacctgcattcgctgacccaggagcctgctttgccaacctcatctgcaactaaaaccatcttaaccgcggcccactggggccaatgctggtggagacggatggtgaaaatgtgatttcgtcccgcggcgcgctggacacccccttcgccaactcgctacaaacggcggtgcgcgaacaggtgcacagtaaaactcgcgtccgctatccgatggtgcgaaaaggctatctcgcctcgccgcaacaaccgcagggcgtacgtggccaggatgaattcgtgcgggtaagctgggagcaggcgcttgatctgattgatgctcagcatcggcggatccgcgaaagctacggcccgcagtcgattttcgccggctcctatggctggcgttctaacggcgtgttgcataaggcggcaaccctgctccagcgctatatgagtcttgccgggggctataccggccacctcggtgattattcaaccggcgcggcgcaggcgatcatgccttatgtggttggcggtaatgaagtttatcaacagcaaaccagctggccgcttattctggagcacagcgaggtagtggtgctgtggagcgctaatccgctgaatacgctgaaaatcgcctggaacgcctcggatgaacaggggatcccctggtttgaccgcctgcgccagagcggcaaacggctgatctgtatcgatcctatgcgatcggaaagcgttgatttctttggcgaatctatggagtggatcgcgccgcatatgggcactgatgtcgcgttgatgctggggatcgcccataccctggtagagcatggctggcaggacgatgaattcctcgcccgttgtaccagcggttatgacattttcgcccgctatttgagtggtgaaagcgatggcgtcgccaaaaccgccgaatgggcggcggcaatctgcggcgtagcggcggataaaatccgcgaactggcgaaacttttccacgaaaacaccaccatgctgatgtccggctggggcatgcagcgccagcagtttggcgagcaaaaacactggatgctggtgacgctggcggcgatgctggggcagattggcatgcccggcggcggttttggtctttcttaccactttgccaacggcggcaacccgacgcgtcgcgccgcggtgctggcctctatgcagggtagcgtggcgggaggaaccgatgcggtggagaaaatcccggtcgcccgtatcgttgaggccctggaaaatcccggggccagctatcagcacaacgggatgacgcggcgctttcccgacatccgctttatctggtgggcgggcggcgccaactttacccatcatcaggataccaaccgcctgattcaggcctggcagaagccggagctgattgtgatttccgaatgcttctggaccgccgccgcgcgccatgccgatatcgtcttaccggcgaccacttcgtttgagcgtaacgatctgaccatgaccggcgactacagcaatcagcatctggtgccgatgaagcgggtggtcgcgccgcgcgatgaagcgcgcgacgatttcgatgtttttgctgacctgagcgaacgctgggaggcgggtggccgcgaacgcttcaccgaaggaaaaaacgatttgcaatggctggagactttctaccagattgccgcccagcgcggggcgcagcagcaagtgacgctgccgccgtttgccgaattctggcaagctaaccagctaattgaaatgccggaaaacccggataacgctaaattctctcgcttcgcggcatttcgcgcagacccgcaggctaacccgttaagaactgcgagcgggaaaatcgaaattcactcgccgaccattgccgggtttggctatgccgattgtccgccgcacccgatgtggctcgaacctgatgagtggcacggcaacgccgaggcgggtcagctgcaggtgctttccgcccatccggcgcaccgcctgcatagccagttgaaccagacttcgctgcgagaacgctacgccgtcgccgggcgtgaaccgctgactatccatccgctggacgcccaggcgcgcaatatcgccgacggcgatctggtacgggtgtggaattcgcgcggtcaggtactggctggcgcggtggtcacggaaggtattcgtccgggggtgatttgcctgcatgaaggcgcgtggccggatatcgatcccgatgccggcatatgcaaaaacggtgcggtgaacgtgctgacgaaagatattccgacctcacgtctgggcaacggttgcgccgggaatacggcgctggcatggctggaaaaatacgatgggccagcgctggcgctcagcgcatttgatccgccggccaatgcataatccaggttgggtgctgggtgtcgtcctgccacgcgcagtcttctatgcggaagccctgcgcatggtagaaattcaccgcccggacgtttttctgatagacctccaggcttagccagtcgtagtgttgcttgacctcatcaagcagcgcgcggccgataccgtggcggatcgcttgcggggcgacgaaaagcgccccgacgaaacgcgaatccatcacgctgacaaaccctttcagcacgtcatcatcctgccacacccaggtggcggcggcgggaagatagacatcgcgcacgacttccaggctatcccgccagtagctttcagcaatgaacggatgcgcgtaaatcgtactgtccagccataactcaagtagcgggccggtctccgtggcattccatctttggatcatgctggtctcccggggtagcaacagcagccggtaacatgatcgttgactaacccgcaggcctgcataaatgaataacagatagtggagccgacaaatttaaagccgcgcttttttagcgccttagatagcgcatcggaggctggtgtggtagtggggatttcggcgagcgtcgccgcatgggtaatttgcggctggttatcgacaaacgaccagacaaaatcgctgaatgcttcaccgttggcttccatggtgagaaacgcccgcgcattgccgatgatggcctggatctttccccgatggcggataatgcccgcattctgtagcaggcgctcgacgtccgcttcatccatggccgctacgcgaaccgggtcgaactggtgaaaggcctgacgatagttttcacgttttttcagaacggttatccacgagagccccgcctgttggccttcgaggcagatcatttcaaacagcttttgcggcgttctctcggcgactccccattctttatcgtgatactggatataaagaggatcctggcttacccatccgcaacgttgcatgtttctctccctttcgtcagaaaactttttcatccgccttgacggctgaaagataaagataatagttaatacagggaaaccacttcccatcaactcttatacttcaagttgcgtagaagtgggcggcagctcgaattattttgagtataaaaacacagcaacattgccgattcggctcttttggagtcgcattaatgataataaagaaatgcaatggcctccggggacgtttggtcccggcgtgcatcactatctggatgtcgtgtgtttcaggcgctaatgcctggcaacaggaatatatcgctaacgatacaaaaagtaatacgtccgaacgctatacatgggatagcgatcaccaaccgcgttatgaagatattctcgccgagcgtatgagagcgtcagaagcgcccgcagggctggcgttaaatcaggcgctgtcgccgcccgatttaggtcacggcatgagcgtgggatggaactattcactggccagcggcgtgacctccgggccggtcgccagcttgcgtagcgatctcaatccgccgccagcgacgcgtcgcgcgggcgaaagtatttatgtcaacacgcttggctggcgtatggattatcagcaactgtggggcgtgcatccatgggcgcaggtaagctataaccagtctatctctgtcgataacaatgcgtcgattagccgcggaaaagacggtagctggggcgatgtcacgttgggcgccgatatgccgctgggttcgcatctggcggcatgggccacgctttcgcaggcagacaacgtaccatcgggtgaaaatacgctgtatctgatgggcgtcagcgccaatttctgacctattttgttatgcatttgaaacatcgccgttactgttaaatctcagtaatggcgcctttttgtgagatagcgcacactaactttttgacggaaattttgggaatgaatgttttgcaatgccattcattccgccataaatgcatttcattcctcgttgatggcagttcatgccttttttccccaccggatatgggggtttggttattgtggcggcagttaatccttcaggacatctgctatgaacgctgcaaacactcaatatacccgctggcttacgctgattggcacgatcattacgcaattcgcgctgggatcggtttatacatggagtttgtttaatagttctctggccagcaaactggacgagccagtaagccaggtggcattttccttcggcctgttaagtcttgggctggcgttatcctcttccgttgccggtaaattgcaggaacgttttggcgtgaaacgcgtcaccatggcatccggcatcctgcttggcgtcggttttttcctcactgcccatgctaacagcctgatgatgctgtggctgagcgccggtctgctggtcggtttggcggacggcgcaggctatctgctgacgttgtcgaactgcgtgaagtggttcccggagcgtaaaggtctgatttccgccttctcaatcggcgcttatggccttggcagcctcggttttaaatttatcgatagccacctgctggcgacggttgggctggaaaaaacatttgttatctggggcgctatcgtactggtgatgatcgtctttggcgccaccctgatgaaagatgcgccgaatcatcccgcgaccactaccgctaacggcgtcgtcgaaaatgatttcacccttgctgaatccatgcgtaaaccgcagtactggatgctggcggtgatgttcctgacggcctgcatgagcggcctgtatgtgattggtgtagcgaaagatatcgcgcagggcatggtgcacctcgacgtggcgacggcggcgaatgcggttaccgtgatttctatcgccaacctgagcggccgcctggtactgggcatcctgtccgacaagatctcccgtatccgcgtgataaccatcggtcaggtggtgtccctgatcggtatggcggccctgctgttcgcgccactgaatgcgatgaccttctttgcggcgattgcctgcgtggcctttaacttcggcggcactattaccgtcttcccgtcgctggtaagcgagttctttggcctcaataacctggcgaaaaactatggtgtaatttatctcggcttcggtatcggtagtatttgcggttcgctgattgcctccgtgttcggcggcttctatgtcaccttctgcgtcatcttcgctctgctgattttgtcgctggcgctctccacgactattcgtcagccgaaaagcgaaatttaccaccaggcccacgcctgatagcgtcgcccttcctaagctaataatgccttaccagccagatattttgtaaatatctggctgaatcacattcctcgcggatacttttcccatttgctgtggtctacttagcgcgctttgtagaggtttccgataaccaacccagacgcactttattaatcttcctgtttatatcgttttattcagggcggtttcatctcttcgtttcccaggtttgcttgcatgaaatacattaaaacgatgtcgcagcagaagctaagcttttggcttgcgctgtacatcggctggtttatgaacgccgcggtgtttttccgtcgtttcgatggttacgctcaagagtttaccgtctggaaagggttgtccggagcggtggaactggtggcgacggtgctggtcaccttcttcctgctgcgtttgctctcgttatttggtcgtcgagtctggcgcatcttagccacgctggtggtgctgttttccgcaggggcaagttattacatgactttccttaatgtggtcattggctacggcattatcgcttcggtgatgactaccgatattgacctgtcgaaagaggttatcggctggcatctgatcttgtggctggcagttgttagtgcgttgccgctgctgcttatctggagcaaccgctgtcgtaagacgctgctgcaacaggttaaaacgccggggcagcgggcgaaaaatatcctgatagtcgtgctggccgggctgatggtctgggggccaattcgcctgctggaagtccgtcagaagaatgttgagcgcaattcagaagtcgatatgccaagctacggcggcgtgattgccaactcgtatctgccttctaactggctgtcggcgctcgggctgtacgcgtgggcgcaggtggatgaatcgtctgataataagtcgctgattaatccagcgaaaaaatttacctatgtggcgccacaggatcttgatgatacgtacgtggtgtttattatcggcgagaccacccgctgggatcatatgggtatactcggctataaccgcaataccacgccgaagctggcgcaggagaagaatcttgtcgccttccgcggcacctcttgcgataccgccaccaaactgtcgttgcgctgtatgttcgtgcgtgagggcggagcggatgataatccgcagcggacgctgaaagagcagaatgtgtttgccgtactgcatcaactgggcttcgccggtgacctgtacgcgatgcagagcgagatgtggttctacagcaatacgatggccaacaatatcgcctatcgtgagcagatcggcgccgagccgcgcaaccgcggcaagaacgtggatgatatgctgctggtcgatgaaatgaagcgcggcatggagcaaaacccgagcggcaagcgtttgatcattctccataccaaggggtcgcattttaactatacccagcgatacccacgcagctttgcgcagtggaaaccggaatgtgtgggcgtggacagcaaatgttcgaaggccgagttgattaattcctacgataacagcgtcacttatgtggatcactttatcgtcagcgtgctggaccaactgcgggataaaaaggctatcgtgttctacgccgccgatcacggcgagtcgattaatgaacacgaacatctgcacggcacgccgcgcatgatggccccgccggagcagttccgcgtgccgatgatggtctggatgtcggataagtatctggcgaatccggatcacgccgcctcctttgcgcgcctcaagcagcaggcggcgacgaaggctccgcatcgtcacgttgagctgtatgacaccattatgggttgtcttggctatacctcgccggatggcgggattaatgaaaacaacaactggtgtcgcgtgccggcttcgaagaaagcggcgcaggaatagcagtagtggcgagattctcgccgcttgattgattttttgctaataaggcattgacggggggcatcccagcagtaagatgcgccccgcattcggtgattggcgcagcctggtagcgcacttcgttcgggacgaaggggtcggaggttcgaatcctctatcaccgaccaaattcgaaaagcctgcttaacgagcaggcttttttgcatctgcggcccgaagaggatgagaacctccggggcaggggttcgactcgagcgtagcgagagaacgttgcgtcagcaacggcccgtagggcgagccacgaagtggcgagtcatcctctatcaccgaccaaatttgaaaagcctgcttaacgagcaggcttttttgcatctgcggcccgaagaggatgagaacctccggggcaggggttcgactcgagcgcttccctgattgcggcgcaagcgccttatcagggctacgtccgtacagcgcatggcgagcccggtagcccggctaagcgcagcgcaagccgggagcgaaaactctgcaacaatcacaaaaatcgcatttccccgtgtatctcgccagctgttcgctattttgtgacatcttccattgcatttttttatcgatgaacagatcttttttcgcgaagcttatggctaactacagcattttacgctgtgcgttttaacgttcgcgctattaatcgctcacataatggtcacatgggaagaaattttcaccatttttaataattgtttatcaccagatgttgcaaactattaaggggtttattctggcttatggccgctagcataaatttctctgctgaaaatagcgccaccaagtttttttaatctttgcccaccgattctcacccctgacgcaaaacccggttagctgtattgacgtttctccattctgttgacagattgtacggcatgaggggcatttcatggagaatccgtactgcaactcagtcgttttagcgaacggaatccccatctctctcaacgccttcgggcaccaccgaccagaccgggtaaaaaataaataaaggtctggcggctatatgcaaacaacatcacagttttggagcagaataatgagtatttccttgaaaaagtcagggatgctgaagcttggtctgagcctggtcgccatgaccgttgccgcaagcgtacaagctaagaccctggtttattgttcagaaggctcgccggaaggctttaacccacagctattcacctctggtaccacctatgacgccagctcggtgcctatttacaaccgtctggttgaattcaaaaccggtacgacagaagttattcctggtcttgctgagaagtgggatgtcagcgaggatggtaaaacctataccttccatctgcgtaaaggcgtgaagtggcaggataataaagactttaaaccaacgcgcgagctgaatgccgacgacgtggtgttctccttcgaccgccagaaaaatgacaaaaacccgtaccataaagtctctggcggcagctatgagtactttgaagggatgggcctgcaggacctgattagcgaagtgaagaaagtggacgataataccgtccagttcgtgctgactcgcccggaagcgccgttcctcgctgacctggcgatggactttgcttctatcctgtcgaaagagtatgccgacaacatgctgaaagccggcaccccggaaaaagtagaccttaacccaatcggtaccggtccattccagctgctgcagtatcagaaagactcgcgcattctgtataaggccttcccgggctactggggcaccaagccgcagatcgatcgtctggtcttctccatcaccccggacgcttccgttcgctatgccaagctacagaaaaacgagtgccaggtgatgccgtatccaaacccggcggacatcgcgcgtatgaaggaagataaaaacatcaacctgctggaacaaccgggtctgaacgtgggatatctctccttcaacaccgagaaaaaaccgctggataacgtcaaagttcgccaggcgctgacctacgcggtgaataaagaagcgatcatcaaagccgtttaccagggcgcaggccagtcggcgaagaacctgatcccgccgaccatgtggggctataacgatgacgttaaagactatacctacgatcctgagaaggcgaagcagctgctgaaagaagcgggcatggaaaaaggtttcaccatcgacctgtgggcaatgccggtacagcgtccgtataacccgaacgcgcgccgtatggctgaaatgatccaagccgactgggcgaaagtcggcgtacaggccaagatagtcacctacgagtggggcgagtatctgaaacgcgcgaaagcgggcgagcatcagaccgtgatgatgggctggaccggcgacaacggggatccggataacttcttcgcgaccctgttcagctgcgctgcggcgaaagacggctctaactactctcgctggtgctacaagccgtttgaagacctcattcaaccggcacgcgccaccgacgaccacaacaagcgtattgaactgtacaaacaggctcaggtagtgatgcatgaccaggctccggcgctgatcatcgcccactccaccgtttacgagccagtgcgtaaagaagtcaaaggctatgtggttgatccgcttggcaaacaccacttcgataacgtctctgtcgaataataagcacgatgcctgatcccctctccccgcgcgggagaggtgggggcgtattcccgctatttggggagtacttttgtgagcaatacagacgccttgtcaccaggcctggcgtcactatagagaaaccgggttatgttgcagtttattctccgacgtttgggactcgtcatcccgacatttatcggtattacccttctcacctttgctttcgttcatatgatccccggcgatccggtgatgattatggcgggcgaacgtggtatttccccgaacgtcacgcgcagctgctggccgaaatgggccttgataagccgctgtggcagcaatatgcccattatatttggggcgtactgcacggtgatttagggatctcgctgaaaagccgaattcccgtgtggcaagagtttgtgccgcgcttcaaggccaccctcgaactgggcgtctgcgcgatgattttcgccgtcgccgtcggtattccggtgggtgtgctggctgcggtaaaacgcggttccatctttgaccataccgccgtgggtctggcgctgaccggctactcaatgcctatcttctggtggggcatgatgctgattatgctggtttcggtgcaactgaacctgacgccggtctccggacgtatcagcgatacggtattccttgacgataccctgccgctgaccggttttatgctgattgacaccgccatctggggcgagcagggcgactttatcgatgccttaatgcatatgatcctacccgccatcgtactgggtacgattccgctggcggtgatcgtgcgtatgacccgatcgtcgatgctggaagtgcttggcgaggattacatccgtaccgctcgcgccaaggggttgacccgcatgcgggtgattgtcatccatgcgctacgcaacgcgatgctgccggtagtgacggtgattggtctgcaggtgggcacgctgctggcgggcgccattttgaccgaaaccatcttttcgtggccaggtttaggccgctggcttatcgatgcgctacagcgccgcgattatccagttgtgcagggcggggttctgctggtggcgacgatgattattctcgtcaacctgctggtcgacctgctgtacggcgtggtgaacccgcgtatccggcataagaagtaaggggccatcatgtcacaaattacagaaaataaagttgtcgccgcgccggtgccaatgaccccgctacaggagttctggcactatttcaaacgtaacaagggggcagttgttgggttggtatacgtggcggtgatgatcatcatcgcggtattcgctaactttctcgccccttataacccggcggatcagttccgtgattccctgctggcgccgccgttctggcaggatggcggcagcctggcgcatctgcttggcaccgatgacgtgggtcgcgatattctctcacgcctgatgtacggcgcgcgcctgtcgctgctggtgggctgtctggtggtggtactgtcgctgattctcggcgtggtgctggggctgattgctggctatttcggcggggtggtggattccatcatcatgcgcgtggttgatatcatgctggcgctgccgagcctgctgctggcgttggtgctggtggcaatcttcgggccgtcaatcgtcaatgcttcgctggcgcttaccttcgtcgccttaccgcactatgtgcgtttgacgcgcgcggcggtgctggtggaagtgcaccgtgattacgttaccgcttcacgcgtggctggcgccggcgcgatgcgccagatgttcgtcaatattcttcctaactgtcttgcgccgctgatcgttcaggcgtcgctgggcttctctaacgctattctcgacatggcagcgctggggttcctcggcatgggcgcgcaaccgccgacgcctgagtggggcaccatgctctccgacgtattgcagttcgcgcaaagcgcctggtgggtggtgaccttcccgggtgtggcgatcctgctgacggtgctggcatttaacctgatgggtgacggtctgcgtgacgcgctcgatcccaaactgaagcagtaagaggttcgagatggcgttattaaatgtagataaattatcggtgcatttcggcgatgagaatgcgccgttccgcgccgtagaccgcatcagctatagcgtgaagcagggcgaagtggtcggcattgtcggtgaatcgggttccggtaagtcggtgagctcgctggcgattatggggctgattgattaccccggccgggtaatggcggacaaactggaatttaacggccgcgatttgcagcgaatttcggaaaaagagcggcgccagctggtgggagcggaagtggcgatgatcttccaggatccgatgaccagcctcaacccgtgctttactgtcggctaccagattatggaagcgattaaggtccatcagggcggcaataagcaaacccgccgccagcgagccatcgatctgctgaacctggtgggtattcctgacccggcctcgcggctggatgtttatccgcaccagctttccggtgggatgagccagcgcgtgatgatcgcgatggcgatcgcctgccggccaaaactgctgattgccgatgagccgaccaccgcgctggatgtgaccattcaggcgcagattatcgaacttctgctggagttgcagcagcaagagaatatggcgctggtgctgattactcacgatctggcgctggtggcggaagccgcgcataaaattatcgtcatgtatgcgggtcaggtggtggagaccggcgatgcgaaagatatcttccgcgcgccgcgtcatccttatacccaggctctgctgcgcgcgctgccggagtttgctcaggataaagcgcgtctggcgtcgttaccgggtgtcgttccggggaaatacgatcgtccgaatggttgcctgctgaacccgcgctgcccctatgccacggataaatgccgtagcgaagagcccgcgctcgcggacctcggcggcggtcgtcagtctaaatgtcactacccactcgatgatgccgggaggcctggattatgagtacgcaaaaggccgccacgcaacaaccgctgttgcaggccattgacctgaaaaaacactatccggtgaagaaggggctgttcgctccggaacggctggtgaaagcgctggatggcgtctcctttacccttgaacgcggtaaaacgctggcggtggtgggagagtcgggctgcggtaaatcgacgctgggtcgtttgctgacgatgattgaaattcccactggcggcgagttgtattatcaggggcaggatctgctcaagcacgacccgcaggcgcaaaagctgcggcggcaaaaaatccagattgtgttccagaacccgtatggttcgctgaacccacgtaaaaaagtggggcagattctggaagagccgctgttgattaacagcagcctgagcaaagagcagcggcgtgaaaaggcgctagcgatgatggcgaaggtgggcctgaaaacggagcattacgatcgctacccgcatatgttctccggcggccagcgccagcgtatcgccattgcccgcgggctgatgctggatcctgacgtggtgattgccgatgagccggtctccgcgctggatgtttcggtacgcgcccaggtgctgaacctgatgatggatttgcagcaggatttaggactgtcctacgtatttatctcccacgacctctcggtcgtcgagcacatcgctgatgaagtcatggtgatgtatcttggccgctgcgtagagaaggggaccaaggatcagatctttaataacccgcgtcatccgtatactcaggcgctgctgtcggcgacgccgcgactgaacccggacgatcggcgcgagcgcatcaagctgaccggcgaactgccgagcccgctgaatccgccgccgggttgcgcctttaatgcgcgctgccgccgacgctttggcccatgcacccagcttcagccgcagcttaaggattatgacggccaactggtggcctgctttgccgttgatcaggatgagaatccggagaaagcgcgagcgtgatgggaggcgggttgccgcgtgatgatttctgcgggggagagctggaatgcgcctcgcagattgccaaagggcgtggtgaaggcgataacacggagcagtagaatcgacgccaagccgggttcgcccggtgaggcgcaatgttgcgggggcttgaaccccggcggcataaataagttgctggaaagagaaaaccctcgcacgttgctggtgttaaccaggcaacagaacgagggctatcgacaactccagacaagttaaagatagccgcgaacggttgccattgcaatacaggcggctctatgacgctcacacagttgggtctgatcttatgggacgatctggcggcgccgataatcgctggcatcgtggtcagcattatcgtcagctggatgcataaccagaagtgacggaccggcgggcgtgagtctgctgcgttggcaatttgcgcccgaacaggccgcaggaattctcctgcggcctttttcgttttgcctggcggcacgcagaatgtggttggttgctggaatgcgcctcgcagattgccaaagggcgtggtgaaggcgataacacggagcagtagaatcgacgccaagccgggttcgcccggtgaggcgcaatgttgcgggggcttgtaccccggcggcatagataagttgctggaaagagaaaaccctcgcacgttgctggtattaaccaggcaactgaacgagggctatcataactccaagcaagttaaagatagccgcgaacggttgccattgcaatacaggcggctctatgacgctcacacagttgggtctgatcttatgggacgatctggcggcgccgataatcgctggcattgtggtcagtattatcgtcagctggatgcataaccagaagtgacggaccggcgggcgtgagtctgctgcgttggcaatttgcgcccgaacaggccgcaggaattttcctgcggcctttttcgtctttactgcggatatggcacccaactgccgccgttgagctgcacgtagggtttgccctgatactgaatgacaatagcgttggagttttccgataccgcagcggtctgcggcaggttcgcggtgtactgctgccagttgacgttatcctcggtaaacatcttgccgtccagggcgcgcaccaccagttcagaaaccgcgaggtagctggaaggctgagtgatttccaccgcagcgccctgatgcggcgccttcatgccgaagaatttcaccgccgcagggacgttggtaatcgacgggctcgggatatcgcgcagtccggaaacctgcatcttatcccccttcagcgcggcgccgtgttccggcaccaccaccaccatcactttacgccccgatttttccagttcggtgaagaaggtgtccagctcatcaaagaatttctgcgcgcgagctttatagtcggctgttttgctttggccgggataatggttgccatcgtgcagcggcagcgtgttgtagaaggtcgcggtacgcggcgtgttgagcttctcggtagactgtagccagcgatcgagcgtcgcctggtcgtcgtaaacaggcgatccgtcgaagccttgcaggataaccggcaaaccgctctgatccattagcgggctctgcataccgccgagcgagcgaacctctttgaggaagtcgccgaagataccgttatgccccagcatcagctgttgggtaaagcccagtttcgccagattttcgaacaggtagcactcgctgcccgatggctgatacagattgttatgcgatagctggccgcagctggcgcgcagcaggcgaaccgcggccgggccgctgtaggaggtggcggagttgaagtttttgaagacgatatcgaaatgtttccacagtggatgatccatcaacccggcagcctcgatgtccgaccatgacagggaacagatattgatcaccagcagatcgaatggctgcgcatccccaggaagctgatccgggaatggtgtttttcttttctgttcagaagcatagaaagttttcagccagttgctaagattagccgaggttggcggttcggtctgcggcgggatatcgccgctggcggcagcgctggtggtagccgtcgcggttgaggttccaccggttgttgccgccggtgtggccgctgccgtagtcggctgaccggcgggccacagagtaaaggagggcaggagcggactgataaccagccagaccatgatcgccgaaacaaacacggtaacgcgcagccactggctgatgaatagccacagcaccagcagcacaaagaaggcgccgaccatattccagttaataaaacgggtgatcaggtcccagatgtaatcggcgctgaaaccggcgatttgcgagccctggctcataatgctttccggaccgggtaaccaggtatcatgccagaacagggcaaagccgagcggaatcgctatccagtggcgtatccggtgcagtttttcgccagggatcggcaccagcagaaaggcgaggaacaccaggttaagcattggatggaaattcaggtatcccgcccacagcagggcaaacttcacgagaaaatagaagttccagccagacaggccgcgccagtactgccatagcggaagcggcgtagcggtagtttttgctttggtcattttttcagtttgccctgcctggtcgcgttatcccggcgcagcacgccggccggtttcacgtaacggggtttaaagaacatcaaacgtaaagtcgtgcgaatacggcgctgataatggcgcgttagataccccagcggaaaaaacagcagggcgcataatacgatcagctgaatgatatcggcgatagacatcatgaccgcggttctccgtcggtggagagtcgccagggttccgggattcgccgccactggcgcccatcgtgcttaacgttaagggcttcgtttttgcctatggtaattggcagcggcgtgttccagttgtccggggagaggccccgcattaacaggatttccgctgagatttgcttgtcttcaaaccaaatcatacgattagagaaaatgtctccggtcggtaacgggaagatatgatttaatgcggtgtcgaggtcatttacccggcaaaacgataaaaacaacactaatcgattattgccgatagtcacgatatcgcccatgcggttgggtttacacagggttaatgcctgttcgacgcgtagtcccggcgcggggcgcaacgccaccatcacccctttgctatccggcggcagcagcgtgttggccatgatgttgctgaccgcttcgcagaaggcgtcccacttttgatagccgcgaagtttaagcggccggctccaggtcaacagcgtgttgaagtcttccggaacgtggcgagtaaatttctgcttttgcacgctttcaatgagcgtcaggcagcgtgaaagcccggcgctgcaagggatcaccatgttggcgccgctgcttagcagcaagcgttcatcagtggcgcgcaggcttggcgtttgttcacgtaccacgatttttagggcgctgccgcgctggcgacgcagggtatggatatagcggccgagctgctctatttgttcgttctgggtgatggaaaatagcagggtggcagcttgcgcggtacgaccggcttcaaagacggcatcattggtttcgaatagcgtccagtattcggaaagtgcgggcgccccttccagcacgcgcaaattactgaggacgattttttcgtcgctgcgcggctgtaccaccgcttcttcgttctgcgccagtcgccagccctcatcatcgtgtaaaataaccaactgctgctgcgcgctaatacctttctcactgccccaccacgcgatatcaaatagatggctatcgccctgataacgaatgctcgccagcccggaaagggctcgatactggcgtaataacggggaaagttgtttgtcggtatcgttagcagaattaagtatcataagagagcaattatggtatttagcccatcgattcgatttctctacccaatggagtaattcttctgtttttatattttgccaggaattttctgtacatagcagaataaataaatagttgccaggttccatcgaacaaagtatgtcgcggtgcaactccctcaggccttccgggcgatcgggcatagtgaataatgcgattttatcggggccacgatctttttttaatgatatgacttcattgggttttttgcccattacgatgacggcggccttactgtcctgtgcctggctttccagcgtttgattcatcaggctgacggcgtcggcatagcggtcgacattaagccaccacaccccgccaacgggcatatggcatacttcgtcccataacgatgaaatacccaacgtatatacaatatccacgatgtccctcgcgcgccctatttacaatgattagtttactagcgaaagcgtgagagtaaacctaacattgaaattaaaggacatcagttttagcatgtacacgtaattttagggatgagcggtttacacttcctggttttataatgtgtttttcgaatggacagagaaatgccggaaaaagaccctgcggtacctggcgatgcgacgctgggatataccttccaaaatgatttcctggcattaagccgggcattttccctgccggatattgattaccacgacatttcccgccgggaacagctcgccgcggcgttgcaacgctggccgctgttggccgaattagcagagaaaaagtaaggaagccgtcgatggcgattctgggattacaaggcatacgcggcggcgtaggcaccacctccattaccgccgcactggcctgggcgctacagctgctcggtgaaacggtactggtggtcgatgccagcccggataatatgctgcgcttttttttcaacgttgatatcgaccatcgcaacggctgggcgcgctcgttgattgatggtcgcgactggcgtgacgccggactgcgctacaccgcgcatatcgatcttctgccgtttggccgtcttacccctggcgaacgtgagcacgttgataagctgagtccgaccctggaacccatcgcggaacaaatcaaattgctcgaccagcagggaagccaccgctggctgctgcttgatatacctgaaggttattctccgcttacccgcgaattgctaagcatttgcgatcgtgcgctgcaggttgtgcaccccgacggcaacagccatattcgtctgcatcagcaggcgctgcctgccaacgcggatattttgattaacgacctgcgcgtcggcagccagctgcaggaagatctctatcaactgtggctggaaagccagcggcgtattttgccggtcacgattcaccgcgatgaagcgatggcggagtgcctggcggcgaaacagccgcttggtgaatatcgccaggattcgctggcggcggaagaggtgctgacgctggccaactggtgcctactgcactatgccagagagggggcggcatgatccgcctgagtacgttgctgctggcgccgccggtgggcgagcgcttgagcgaacgttatgatgactatcgtcagcatggcgcgtcggtgctttcggcttttctcggttgtctgtgggcgtcgctggcgtgggcattcgtgccgctagagacgccgcgctggcaagctattcgcgaacaccatgccgactattttccgcatattaatccgcatcgcccacgcccgttagatccgctgcgctatttgctgcagtcgctctggctgctggcgacccgggtgccggaagcggataaaaaaattaactggcgctcgctggcggcgctggaaggcgttcacgggcgctacgcgcagtggctggaaaaattaccggagaaggtcaacacccgtaccggccacctcgataaacagaaagagcttgagcatctgcatccgcagctgcggcggctggtgctgggtaccatcaccttcttctcgctgattctggcgctgttgtgtatcacccagccgtttaacccgctgtcgcagtttattttcctgctgttactgtggggcgtcgcgctgctggtgcgacgtattccggggcgtttctccgccctgatgttgatcgtgttgtcattgaccgtttcttgtcgctatatctggtggcgctatacctccacgctgaactggaacgatccggtcagtctggtgtgtgggttgattttgctgtttgccgaaacctacgcctggattgtgctggtgctgggctatttccaggtggtgtggccgctgaatcgccagccggtgccgctaccggaagatatgaacgaatggccgacggtggatatcttcgtcccgacctacaacgaagatctcagcgtagtgaaaaataccatctacgcttcgcagggtatcgactggccgaaggataagctcaatatctggatccttgatgacggcggtcgcgaagagtttcgccagttcgcaaaagatgtcggcgtacattacatcgcgcgtaccagtcacgaacatgccaaggccggcaatatcaacaatgcgctgaagtatgcgaaaggcgagttcgtctctatttttgactgtgaccacgtgcccacccgctcgttcctgcagatgaccatgggctggttcctgaaggataaaaagctggcgatgatgcagacgccgcaccactttttctcgccggatccgttcgaacgcaacctgggccgttttcgtaaaacgccaaatgaagggacgctgttttacggcctggtgcaggacggcaacgacatgtgggatgcgacctttttctgtggttcctgcgcggtcattcgccgcggcccgctggatgaaatcggcggtattgccgttgagacggtgaccgaggatgcccacacttcactccgcctgcatcgacgcggttacacctccgcctatatgcggataccgcaggcggcgggtctggcaacggaaagcttatcggcgcatatcggccagcgtattcgctgggcgcgcggaatggtgcagattttccgtctcgataaccccttattcggtaaagggttgaagctggctcagcgtatctgctacgtcaacgcgatgctgcactttttgtccggtataccgcggcttatcttcctcaccgcgccgctggccttcctgctactgcacgcctatatcatctatgcgccggcgctaatgatcgccttgttcgtgctgccgcatatgattcatgccagcctgaccaactcgaagatccagggcaagtaccgccactccttctggagtgaaatctacgaaacggtgttggcatggtatatcgcgccgccgaccttcgtcgcgctgattaatccgcataaaggcaagttcaacgtcaccgccaaaggcgggctggtgaaggatgaatatgtcgattgggttatctcccgtccctatatttatctggtgttgctcaatctggtgggcgtggcggtcggcatctggcgctttatgtacgggcccgagaacgaaattttgaccgtctgggtcagtatcatctgggtgttttataacttaatcatcctcggcggcgccgtggcggtgtcggtggagagcaagcaggttcgacgttcgcaccgcgtcgagatgtcaatgccggcggcgattgcccgcccggatggccacctgttctcctgtaccgttcatgactactcggacggcggcctggggataaaaattcacggtgaagcgcgagtactggaagggcaacacgtgaatctgctgctcaaacgcggacagcaagaatatgacttcccggtacgcgtcgcgcgggtgaacggtggtgaagtcggtctgcaattgctgccgctgacaaaccagcaacatattgattttgtgcagtgtacgtttgcccgcgctgatacgtgggcgctttggcaggatagcttcccggaagataagccgatggaaagcctgctggatatcctcaagctggggttccgtggatatcgtcacctggcggagttctcgccgccgtcggtgaaggttattttccgctcgctcacctcgctggtggcctggatcgtatcgtttttaccgcgccgtcccgaacgcgcagcggcggtgctttcggcagaaccggcaatggctcaacaatgatgataatgcgatgaaaagaaaactttccttgatttgtgcagtggcggtgggaatgagcagttggtaccccttcgcaacattttcggctccggcgacgtcgccggaggccgtggttgccggagctccagcgacagcgggagccgttcagccagcgccggtcgttaacgatggccagccaacggcgacggttatcgattctgccgccgtgccggtggtggtggcggacaacattccctctcgcgatgtgaagctgacttttgcgcaaatcgcgccgccgccggggagcatggtgctgcgcggttcgcaccctgagggcgccgtagagttcggtatgcgcagcgatgaggtggtcgccaaagcgctgctcaatcttgactacacgccgtcgccatcgctgctgccggtgcagtctcaactgaaggtctatctcaacgacgagctgatgggcgtactgccggtcaccaaagagcaactgggtaaaaaagtgagcgcccagatccctgtcgatccgctgtatatcaccgattttaaccgcgtgcggctggagttcgtcggccactatcgcgacgtttgcgaaaacccggcgagcagtacgttgtggcttgatatcggtcgtgagagctcgttggatttaacctatcagtcgctgcaggtccgtaacgatctctcccacttcccggtgccgttctacgactcgcgcgacaaccgtccgctgacgttgccgatggtttttgcttctgcgcctgacgtcaaacaacagcaggctgcggcgattattgcctcctggtttggcagcaaggctggctggcgtggtcagcagttcccggtccacttcaatgagttaccggaacgtaacgctatcatcttcgcgaccaacgataagcggccggacttcctgcgcgaccatccgccggtgaaagcgccgaccatcgaaatggtcaaccaccccagtaacccgtacgtcaagttgctggtgattttcggccgtgatgatcaagatctgctggtggcggccaagggtattgctcagggcaatattctgttccgcggcgatagcgtcgtcgtggatggcgtgaaagagttgaaggcccgtcagccgtatgacgcgccaaactgggttcgtaccgacaggccggtgactttcggcgagctgaaaacctatgaacagcagctgcaatcaagcggcctggtgccagattcgattaacgtagcgctgaatctgccgccggatctgtatctgctgcgcgctaacggcatcgatatggacctgaagtatcgctataccatgccgcctatcaaagatagctcgcggatggatatcagccttaacgatcagttcctgcagtcgttcagcctcaatagctcgcaggatgtgaataagctgattttacgcctgccggtgctgcaggggttactggacggccagaaccaggtgactatccccgcgttgcgtctgggcgcaatgaaccaattgcgcttcgatttccagtacatgaacccgatgcccggcggcaacatcgataactgtattaccttccagccggtgaagaatcacgtggtcatcggtgatgattccaccatcgatttctcgaaatattaccacttcctggcgatgccggatctgcgcgtcttcgccaacgccggtttcccgtatacccgcatggccgatctctctcagacgctgatcgtggtgccgaaaacgcctgatgcgggtcaggttgagacgctactgcaggcggttggcggccttggcgcgcagagcgggctggcggctatcaatctgcagatgaccgatgacggcaaccagattaagggcaaagatgccgacctgatgctgattggcgctattccgccgtcgctgaaagacgataccaaaatcaatttgttggttgaggcgaccaaaagctgggtgaaaacgccgatgcggcattatgacctggccagcatctacccggacgatgacgcccgcacgccgcatacgcgaaccgacatcacctcttccggaccgatggcggcgattatcggcttccagtcgccatacaacgatcagcgcagcgtgatcgccctgatggccgatagcccacgcggcaacgagttgctcacaaacgccttaaatgacagcggtaaacgcgcggcgatgttcggttcggtggcggtgattcgtgaatccggcgttaatagcctgcgggttggcgatatttactatgtcggccatctaccgtggttcgagcgtatctggtttgcgctctccagccatccgatactgttggcgattctggcggccgtcagcattgtgctgttggcgtgggtgctgtggcgcatgctgcgtattctcagccgtcgccgtcttgatcctgatgatgagtaattgctgatgaatgcatttcgtggggtacttctctcggtattgatgctggcggcggggcaggttagcgccgcctgccagtggcccgcctgggagcagtttaaaaaagcgtatgtcagcgccgaagggcgggtcatcgaccccagcgatgcgcgcaaaatcaccacctccgaagggcaaagctacgcgctgttcttcgctctcgcggccaacgatcgtcagggcttcgataagctgttccagtggacgcagaacaacctggcgcagggcgatctgcgcgcccacctgccgggatggctatgggggaaaaagagcgaggatgaatggacggtactggatagcaattcggccgcggattctgatttgtggattgcctgggcgctgctggaagccggacgcctgtggaaggttgataactatactgaggtaggaaaagcgctgctggcgcggattgccgatgaagaagtcgctgatgttccggggctggggccgtcggtactgccggggaaagtcggtttcgcggacgataagggctggcgctttaatccaagttatctgccgccgcagctcgccacctactttacccgctttggcgcgccgtggccgaagatccgcgacagcaatctgcgactgctgctggaaacggcgccgaaaggtttctcgccggactgggtgcgttatgagaaaggcagcggctggcagttgaaaaccgataaaccgattattggcagctatgacgctatccgcgtctatctgtgggtcggtatgctcaataacgctgataaacaaaaaacgccgctgttggcgcgtttcaaaccgatggcggctcagacgatcaaacagggattaccgccggaaaaaaccaatatcgccagcgggaaaacgactggcgaggggccggttggcttctccgccgccatgctgccgtttttacaagatgaggacgcccgcgcgctacaacgccaacgggtcgccgatcattatcccgatgctaaggcctactacagcgcggtgctgacactgttcggccaggggtgggatcaacatcgttttcgtttcgccgcgggtggcgaattacaacctgactggaaccaggcatgcgaaagttctcactaagcttcatcacgctgtctgtcggccttggcctgttgccgctggcgcaggcggcgaataccctgcgcagcagcatctgctggaacaagtgcgtcttggtgaggcgagcagtcgtgaggacctggtgcgtcagtcactctatcggctggaactgatcgacccgaaaaaccccgattatcttgccgcgcgggctcgctacctgctgcgccagggcgacaccgccggcgcgcaaaagcagctcgaactgctggcgaaactggctccggaatcatcggcgctacaagcgacgcgcaacgagatgaagatcagtaccggcagcggtcgccaggcgttgcagcaggcgcgattgctcggcgttgccgggaaggtcgatgaagccgtcgccgcctatgaaaagctattcggcggcgtcccgacggatactgaagccgctatcgaatactggacgctggtggcgcgattgcccgctcgtcatagcgaaggtgtcagccagctgaaaaaactcaatgtcagtacaccggataacgtcacgctactgacctcgctggcgaagcagatgttttcagataacaagccgcaggaaggcttcgcctatctggaacagatggcgcgttcggcctcaggccgcggtatcgcggctgatatgtggctcggcgaaattaaaagtatgccggtcagtagcggcagcgttcaggcactacagcgattcctgctccagttccccgccggttccgccgccgctaacgcccgggtgctgctggcgcagcagcaaactcaactgcaagacccaaccttccgcgccaaaagcgaagggctggcggcggtgaaatccgggaatacggcgcaggcggtggccgatctgcagcaggcggtacgcgccgatgcccgcgatagcgatgccgtcggcgcgctgggcgccgcctactcacagcgcggcgaccgggcgcgggcggtggcgcagcttaataaagcgatcgcgatggatccgaaaagccctaatcgcgataagtgggacagtttgctgaagaccaaccgctattggctgttgattaaacagggcgataacgcgctgaaagcaggccaactggcgcaggcgcaaaacgcgtacgctcaggcgcagcgggtggataacaccgacagctacgcggttctgggttaggcgatgtcgccgcggcgcgcaaagatgacgtcgccgccgaacgctactatcgccaggcgttacgcatggatcgcgacaataacctcgcggtacgcggtctggcgaatgtttatcgccgtgaatcgccggaaaaagccagcgcctatattgccagtctctccgccagccagcggcgcagtattgatgatatcgaacgcagtcttaccaacgatcggctggaaaaacaggccgaagcgctggaaagccagggcaactgggcgcaggccgcggaggtgcagcggcggcgtttggctctggatcctgaaagtgtgtggataacctatcggttggcgaaagatctggtcagtgccgaccagcggccggaagcggacgcactgatgcgtaacatggccaaccgcaagccgggcgacgccgaacgggtttacgcctacggcctctatttgtccggtaataatcaggatgatatggcgctggcgcaaattaacgcgctgccgcgcggacagtggaccgataatattcgtgaactggaagggcgtctgcaaagcgacaaagtgatgcgcgaggccaaccatcttcgcgatagcgggcaggaagcgcaggccattgccttgattaaacagcagccggaatcgatccgctacgatctggcgttggcggattgggcgcagcagcgcggcgatagcgcagaggcgatagcccagtaccatcgggtgctgagccagcaggctgataatggcgatgcgcgccttggcctggcggaagtttatcttgccgagggtgataaaaacgccgcccgcgcgcaggtcgcgcagttgaaggatgcggatacggaatcgattaacatgcaacggcgggtagcgctggcccgcgccggatttgacgataccgcgggcgcgcaacaaatattcgaccgcatcgtgccgcaggcgaaaagccagccgccgtcgatggaaagcgcgctggtgctgcgtgatgccgcgcgcttccagacgcaaaccgatcaaccacagcaggccctggaaagctataaagatgcgatggtggcctcgggcgtgacccgcgttcgcccgcaggataatgacacctttacccgcctgacccgcaacgatagccaggatgactggctgaagcgcgggatccgcagcgacgccgccgatctttatcgccaacaggatcttaacgttacccttgagcacgactattggggatcgagcggtacaggcggttattcagacctcaaagcgcacaccaccatgctgcaggtagacgcgccgctgtatgacgggcggatgttcttccgtaccgatgtggtgaatatgaacgccgggacattttccacgaatagcgatggcggttattcgccgagttggggaacctgtggtgaaattagctgctatggcggcagtaaaaatcagagcgatggcggcgccagcgtagcggttggctggaagaacgacacctggagcggcgatatcggcaccacgccgatgggctttaacgtggtggatgtcgtgggcggactgagttacagcggcgatgccggcccggtcggctataccgtcaacgtccaccggcgacccatttccagctcgttgctctccttcggcgggcaaaaagataatcctaacgacggccataccggtactacctggggcggcgtccgcgctgccggcggcggcatcagcctgagctacgataaaggcgaggctaacggcatctggtcatcgctgggtgccgatcaactcaccggcaaaaacgtcgaggacaactggcgcgtacgctggatgaccggttactactataaagcgatcaatgaaaataatcgccgggtgaccatcggcctgaccaatatgatctggcactacgacaaagacctcagcggttacacgctgggccagggcggttactacagcccgcaggagtatctctccttctcggtgccggtcatctggcgtcagcgtaccgaaaactggtcgtgggaactcggcgggtcggtgtcgtggtcccattcgagcacgcaaactcaggcgcgctatccgttgctgaatttgattccgtcgcagtatcgctacgaagccagccagctaaaagaagagggcggcagcagccagggcttcggttataccgcacgggcgctggtggaacggcgagtcaccggcaactggtttgtcggcgcggctgtggatattcagcaggcgaaagattacaccccgagccacgcgctgctgtacgtgcgctattcagctgccggttggcagggcgacatggatatgccgccgcagccgttggtgccttatgcggattggtagcagattagcctgatttctacggctaatcgccaatccacctcgctgttcgcgtatactcgccgtacctcgcccgccgctttcgggaagaacctgtcttgcgggcgagagcgaacaatttgcgtatataatcagcctgaaaacgaccggtattgatggatctcgccggatagttgttcagtttcagtggagaacacagttgcgcgtcagccgctcacttacaattaaacagatggcgatggtcgcgagcgtgtccatggcgtttgtcctggtcttttgttccattttgctgtttcactttgtgcaacagagtcgctataccacggccacgcaattagaaagtatcgcccgttccgttcgcgagcccctgtcggcggcaattttgaaagccgacattcccgaagcggaagctattctgggccgcattcagcctgctggcatcgtcagccgggcggatgtggtactaccgaatcaatttcaggcgctgcggatgcgctttattcccgaacgaccggtgccggtgatgatcactcgcctgtttgaactgccggtacagatatccctgccgatttactcactcgagcgtccggctaacccgcagccgctggcctatctggtgttgcaggcggattcctatcgcatgtataaattcgtcatgagcgcgcttgcgacgttggtgactacttacttacttttggtgctcattttgacggtggcacttacctggtgtatcaaccggctgattgttcgcccgctgcgcgccattgcccgcgagcttaacgatattccgccgcaggagcgtctcggacatcagctgagcctgccgcggctgcaccaggatgatgaaatcggcatgctggtgcgctgctacaatcgcaatcagcagtcccttctgcgccagcatgatgagttatcgctgcaatcgacccgttttccagtgtctgaactgccgaataaagcctttttgatggcgatactggagcagaacgcgacccgtccgcagccttcggcgctgctggtggtagcctgtgagaccttgcaagatgccgcgggcgtgctgaaagagagccagcgcgagatgctgctcctgacgctggttgagaagctaaaagcggttatcccggccaatatggtactggcgcaaattagcggttacgattttgctattttcgctcccgggctcagcgagccgtgggatgcggtgtcattaagtaagcaagtgctcacttcaattagtgaacgattaccactgcatggcatccagctgcgcccctgcgccagcgtcggtattgcgatgtttaatagcgaactgagcgccgaacagttttatcgccgggcggtttccgccgcggtgacggcgcggcgcaagggcaaaaatcagatcgagttctttgaccccgagcagatggaaaaagcgcagcgccggttaatggaagaacacgacattctcaccgcgctcgataatcagcagttcgcgatctggttccagccgcaggtggatatcgccagcggcaaaatctgtggcgcggaagttctgctgcgccagcgccaggcggatggcagttggtcgctgccatccgacctgatcgagcgtattgaaagctgcgggatgatggtaccggttggttactgggtgatggaagaagcctgccgccagctggcggcctggcagaagcaagggatcatgctgccgctctcggtgaacgtctcgcttctgcaactgctgcatcctgagcgcggcattgagctgcagtcgctgattgaacgctatcggattgcccctggcaccctggtgctggaagtcactgaaagccgccgtctcgacgatccgcaagcggtgattgccctgttgcgcccgctgcgcgaaggcggcacgcgcattgcgctggatgatttcggcatgggttatgccgggttgcgccagctgcagcatatgaaatcactgccggtggatatccttaaaatcgacaaggcgtttatcgatatgctgccggaagacaccagcatggttccggcgattatccagctggcgcgcgggcttaacctgcggatcgtcgccgaaggtgtggaaaaagaagagcaatatgcctggttgcaagcggcgggtgtggatgtcgctcagggttacctgtttggttgcgctttgccgctggaaagctttatgcagcgcttcctgcaggccgataaggacgatgcaagtttgtaacatttttatttgtttgtgcgagtcagctcaaatattttaacaattccgttgcaacttcgcggttacttatttctgaaatgtttccagggtgttatttttaagccacagacacagataacctttcattgtctgtggtttttcccaaaggacaccctatgaaactctctctcttcaaaagcctctatgtccaggttttatcggccatagctatcggtattttgctgggccatttctacccggaacttggcgcgcagatgaaaccgttcggcgacgccttcgtaaaactgattaaaatggtcattgctccggttatcttctgtaccgttgtgacagggattgccgggatggaaagcatgaaggccgtcggtcgtaccggtgcggtggcgctactctactttgaagtggtgagtaccattgcgttgattatcggtcttatcatcgtcaacgtagtgcaacccggcgcgggcatgaacgtcgatccagcgacgctggatgcgcacgcggtggcagtctacgccgagcaggctaaagatcaggggttgtcgccttcttactcgatattattccgggcagcgtgattggcgctttcgccagcggtaatattttgcaggtgctgatgtttgccgtcctgtttggctttgcgctgcatcgtttaggtagcaaaggccagctgattttcaacgtcattgagagcttctcgcaggtcattttcggcattattaacatgattatgcgcctggcgccgatcggcgctttcggggccatggccttcactattggtaaatacggcgtcggtaccctggtacagctgggccaactgatcatctgcttctacatcacctgtatcctgttcgtggtgctggtactgggctctatcgcgcgggccaccggctttagcatcttcaagttcattcgctatatccgcgaagaactgctgattgtgctgggtacctcctcatcggagtccgcgctgccgagaatgctggataagatggagaagttgggttgccgtaaatcggtggtggggttggtgatacctaccggctactcctttaacctcgacggcacctccatctacctgacgatggcggcggtgttcatcgcccaggccaccaatagccatatggatatttttcatcagatcaccctgctggtggtgctgctgctctcttcgaaaggggctgcaggcgtcaccggtagcggatttatcgtgctggcggcgaccatctccgcggtgggacatctgccggtggcgggcctggcgctgattcttggtatcgaccgctttatgtccgaagcgcgcgcgttgaccaacctggtgggtaacggcgtggcgaccgtggttgtcgcgaaatgggtgaaagaactcgacgccaaacagctcgatgatgtgttgaataaccgcgttcccgcggacaaacagcaagaattatcctcgtaattcctcatgttatgcccatagactatgggctcctgcgcaaaattaggtatcattctccttctggggaatgatacctcacgattattttacgtcttcatgtgacattttcgcctacgcgtggtctaaccgacgtatttgattcaccacctttttcggtaacccggcgatgggttgcctatgtaaccaggaatgttcatcaggggttcacatgcagggcacaaaaattcgactcttaaccggtggtttgctgatgatagcgacggccggttatgtgcaggcagaagcgctccagccggacccggcctggcaacaggggactttggcgaacggtttttcgtggcaggtactctccacgccgcagcgccctagcgatcgcgtcgaagtccgcctggctgtgaatattggctcgctgagcgaaagcactcagcagagcggcttcagtcatttcattccgcgcctggcgctgacccaaagcggcagcctcccgacgatgcaggcgcgttcgctgtggcagcagagtattgacccgaagcgtcctctgccgccagcgatcgtttcttacgatttcaccttgtttaatctgagtttgccgaataaccgcaacgacctgctaaaagaagcgttgaactggctggcggacgctaacggtaaattgagtattacccaacaagccgtcaatcatgcgctgcagggcagcgatatggtggcgacctggccgctggatacccaggaaggctggtggcgctatcgcctgaagggctcaacgatgctcggtcacgatccggcggcgccgttgaagcaaccggttgatattaaacagctgaaagaattttatcagaaatggtacaccccggatgcgatgacgctgattgttgtcggtaacgtcgatagccgcagcgtcgctgagcagatcaacaaaatcttcggcgaactgaaaggtaaacgcgagaccccggcggcggtcccaacgctatcacctctgccggctacgccggtcagcatcatgaccgatgccgtgcgtcaggataagctgtcgatcatgtgggattccccatggcagccaatccgcgattccgccgcgctgcagcgctactggcgcgatgacctggctcgggaagcgctgttctggcacgtgcagcagaacctgagcaaaagcaacgtaaaagacatcggtctcggttttgattgccgtgtgctgtaccagcgcgcccagtgcgcaatcaatatcgactcgccgggcgaacgcctgaacgccaacctgagtgcggtatcgcgtgaactggcgaaggtgcgcgacaacggtctgccgcaggaagagtttgatgcgctgattgcgcagaaaaacctcgaactgcaaaagctgttcgccacctacgcgcgcacggataccgatatcctgattagccaacgcatgcgttcgctgcaaaatcaggtggtggatatcgcgccggagcagtatcagaaactgcgccaggagttccttaattcattgacggtcgacatgttgaatcagtatctgcgccagcagttgtcgcaggatatggcgctggtgttgcagcagccgaaaggcgagccggagtacaacatgaaagatctgaaagcgacgtgggaaaaactgatggcgccagcacccgctgcggcggtgagcgccacgccggatacggttgatgcgcataacgaggcgacggatattcccccagcgcagtaacacaggcagcgggcgcggagccgcttttgcgccggatggcggctacgccttatccggcctacggttcgtgccattgcgagctggagttgttaactctacctctgccccatggttactgaaactgccggtattggtggcctcaaaatccccggcggcgctccgcttaccggggctacaccacggtacggtttggtagccccgcaagcaggtggaatagggtcttagtccggcatcgcttcgcgcgggataatcgccccgcgatactggataaccgtgctggcggtgaggtgtccgcgtttcgctgcggattccgcgtcgccgccggtcaggcgcaccgccagatagccggcgctgaacgaatcgcccgccgccgtggtatccactactttctctttcggcagcttcaccgcgggcacctccagcagcggctggccgggaatcgctaccaggcaggagtcggcgccgcgcttcacaaccacctcttctacgccagcggcgtgggtacgggcgataacctcggcaaccggtaccgctccccacagcgcatcttcatcatccagcgtcagaaaagcgatatcggtacattccagcatttgctggtaaacctggcgagtctcttgctggctggcccacaggcgcggacggtagttattatcgaaaatgactttcccgccgttggcgcggcattcgcgcagtagcgtgagtagcttttcccggctggccgggctgaggatggcgaggctgatgccgctcagatagaggtaatcaaaggtagccagctcttcgcagatggcgcctgcgcgctcgctttcgagccagaatttggccgccgcttcgttgcgccagtagtagaaggtgcgctcgccggtctcgtccgtttcaatgtagtaaaggccaggcagacggtcagccatgcgctgaatcagatcggtttttacctgctcgccctgccaggattccagcatctgctggctgaaggtgtcggtgcccagcgcggtcacgtagtgcacgctaagggcatccgcgctggtctggcgcgcgatgtagacggatgtgtttaaggtatcgccaccgaaaccgcgattcaccgccgcgtttttctctgacagttcaatcatgcattcgccaatcacggcaattttcttagacatagtgctgacctgaaattgaatcgaaattaacggtagtttgcgctgggcacccggcatggtcaatcatattaaaacatcgttccattattttttgacctgacgcgcaaaatgtgacgaaaagcgcatttggcggatgaatccacgctcttcaactatagtgaggagtgacgagacgcaaaaggagcggagaggggatgaccagaacccgtaaaacgattgctattatctcgggaacgatagtgctgttaatcgttctttttttcattgtgttggcgacctttgactggaaccggctgaagccgacgatcaatcagaaagtctccgccgaactcaatcggccattcgccattcgcggcgatctgggcgtggtgtgggagcgacagcctgaggagcgcggttggcgcagttggataccgtggccgcatgtgcatgccgaagatatcgtgttgggcaacccgcccgacattccgcaagtgacgatggtgcatctgccgcgcgtagaagcgacgctggctccgctggcgctgctgagtaaaacggtctacttgccgtggattaagctcgaacagcccgatgcccggctgattcgcctggcggaaaacagcaataactggacctttaaattagcttcagaccagccctccgaaaaagccaacccgccatcgtcctggtctttccgccttgataatattctcttcgatcgcggcaacatcgccattgacgacaaggtaagccgcagcgatatcgcgatcgtggtcgatccgctcggtaaagcgctgccgtttagcgaagttaccggcgcgggtgacaaagcgcaggcgaaaaaagccggcgactatatctttggcctgtctgtgaaggggcgctacaaaggccagccgctgagcggcagtggcaaaattggcggcatgctggcgctgcgtagcgatagtacgccgttcccgctacaaggggattttcactccggtaacacccggatagcgtttagcggcacaatcagcgatccgcttaacgtcggcgggctcgatctccggctgaaattcgtcggcgactcgttgcgcgacctctacgacctgaccggcgttctgctgccggaaacgccgtccttttccaccgatggccgcctgcgcgccgactttaaacataaaaacggcatgcgttttgactatcgcgattttaacggccggattggcgacagcgatatccacggttcgttgacctataccaccggcaaaccgcgaccgaagctcagcggcgatctggaatctaaacagctgcgtctggcggacctgggtccgctgattggcgttgattccggcggtggggcgaagaaatcctcatcacgtaaagcgggagatgccgaacagccggcgggaaaagtcctgccggccgatcgctttgagacggataaatggcaggtgatggacgccgatgtgcgcttcaaggggcgacgaatcgaacatggcggtactctgcccatcagcgacctggcgacccacattattcttgaacgcggcgacctgcgcctgcagccggtgcgctttggcctggccaacggttcgattgccggcagcgtgcatctgcagggcgataaaaaaccgctacagggcgaagccaatctgcaggcgcggcggctcaagctcaaggcgctgatgccaaacgttgaaatgatgcagaaaacgctcggtgagatgagcggcgatgtgcaactgcgcggcagcggtaattcagtggcggcgctgcttggcaacagcaacggcaaccttaagctgctgatgaatgatggtctgattagccgcaacctgatggaaatcctcggcttaaacgtcggtaactttatcattgggcagattttcggcgacgaggaggttcgggtgaactgcgcggcggccaatatcgatgtggtcaacggcgtggcgcgaccgcaaattttcgccttcgatactgagaacgcgctgattaacattaccggcaccgccagctttgcctctgaacagctggatctgaccgttgacccggaaagtaagggcttgcgggtgattactctgcgttctccgctgtacgtgcgcgggacgtttaaatcaccggatgccggggtgaaagccgggccgctgattgctcgcggcgcggtggcggcagcgttggcgacgctggtcacgccggcggccgctttactggcgctgatctcgccggcggaaggcgagacgaatcagtgccggacgattttatcgcagatgaaaaagtaaggatgagatgagcgatggccctgacggcaacagcgtcagggcctgcaatttacagcgattgatggcgggtttcgtgggtcaacagcaaagcgatcagcgtcagcgccgccatcgctgccaggtagataccgacagccgccaggccgtaattgccctgcagccaggcggcaatatatggtgcgaccgacgcgccgaggatcgacgacacgttataggagaaagaggcgccggtataacgtacttccgtcgggaacagctccggcagcagcgcgcccatcgggccgaaggtcaaccccatcaggctaaggcccagcagcaggaaggcgaagaccagaatcgggttgccggaaccgagcaacggtttaaaagcgaacagtgcgaacagaataatcatcgtggtgatgataatcatgcttttacgacggccaaaggcatccgccagcaggcccgccaccggcaccatcacgccgaaaccgatgaccgccatcatcagcatccacagcacttcgttacgcggcaaacctaagccaatcggcgcggcagcggtactgaaggtcatggagtaaacggtcatgatatagaacagggtataggtcgccagcatgatgaaggtgccgagcacggtcacgcgcacgtgcttagtcagcagcgtgccaagcggaattttgacctgttttttcgccgccgccaccttggcgaacaccggggtttcatgcagcgacacgcgaacatacagaccgataatgaccagtaccgcagagaagatgaacggcacgcgccagccccattccataaactgctggtcgctcaacagccacgacagcagcaggaaggtgccgttggcgaagaagaagccgattggcgccccaagttgcgggaaggagccatatagcgcgcgtttgcgcggcggagcgttttccgtcgccagcagcgccgccccgccccattcgccaccaaggccgagaccctgaccaaagcgcgccagcgccaacagcatcggcgccagaataccaatgctttcatagcccggcagcaggccgatgaccacggtggagatgcccatggtcagcagcgaggcgacaagtgtgaccttacggcctacacggtcgccgaagtggccgaatagcgctgagccaatcgggcgcgcgacaaaggcgatggcgaacgtcgccagcgactgtagcgtcgcggcggcggcatcaccctgtgggaaaaagatatgggggaagacgataaccgcggcggtggcgtaaatatagaagtcgaagaactcaatggcggtgccgatgagcgaggcgacgacgactttattacgcgagttaaccggcgtggcgtcttgcgcgttgtcgatagtagtggctgtggcttgcatagatctttcttatttttgagcgaacgaaaagccatatagccacagcaaaagagacatttcaatctgtaacaaaactcgctattgcgcaaaaaacaggcaaaaagcggataattttcgccctgagaaaatatcttctatgaaatgcttcacataattaaaatattagagaataaaaccagttttaggttaaataaaagttacgcactggatttatctgctgaaatgataggtcgggctgaattttgcgtctttattcagcccgataatgactttaatcgtgggctttgcccggcatccgcttatcgtctttgtactccgcggtcgcaatccatgcggcgcagaagagggtcagacgggcgaagaagtagaagaaggccattagccccagtacggaaccaaaggcggcgccggatggggatttcaccagcgccggcagcgtccaggtcatcacgattttaataatctcaaagccaatcgccgcaattagcgtaccgcggaacagcgctttgcggcgtggacggtggcgcggcagtcgccagaagatccagaaaaacagcagatagttcgcgaagatggaaatcgccaggccaatcaggcgccatgcgggtttcagccattctatataatcgagatacagcgcggagataatcatctgctgtgcagatccggcgacggaggtaatcgacagcgtgatcaccagcgcgaccagcaggccaatcagcgatatcagatcgcggaagtattttacccagattttttcctgatcctgcggcgtacgttcccacacgtcgcgtgactgggcgcggatcgcttcacgcaggttgcccatccagttaataccggagtagagcgcgaccaacaggccgaccagcccgacggcggtacgctgctgtacggcggtgttgatggtgtttttaagcgttgccgccagcgtcgggtcgctgacgttttgcaggattttatcgaagatgtcctgcagcagggtcggatgccaggccagcacgaaaccggcggcggcaaatgagaccatcagaatggggatcatcgacaaaaatgagaagtaggtgatggctgcgccaaactgattgccaagcctgtcattgaatcgctcggcggcgcgcagcaggtgggctattaccggattgcgctgaactttggccgccgttccggtgaccgttttcagcgcctggttagctttctgcccaacggcggaatcgttgatggcggcgagcgtacttttgtttttctccggctgctggcccgtttcctgtggcggttggcgatcgtcgttttccggcgtcataagtaatttcttcctttctttacagcgatattcagccaaaagtataccttaaacggcgcatcttgcaggcgcccatcggccccacaggcgttgacgacccgcgccgattaatcgacataacctttcatcaatccacccagccactccataaagagatgcacgcggcgggagaggttgcgccgatgtggatagataatcgacaccggcatcggttcggcgcggtactgcggcaggatctcaaccagctcgccggtacgcagcggttcacgtacggcaatgcgtgggacctgaataatgccgagcccggcctggcaggccgcctgataggtttcggtgctattgacggtcaacacgcctccggttttcacccagcgcacggcgccatcgctgacgagttcaaaaccaggctgccgcgcgccgaagttgctggcgtagtggatcagggcatgatccgccagatcgtcgagactttccgggtagccgaagcgcgccagataatgcggactggcgcagttaatttgcgtgagtttgccgagcgggcgggcgatgagtcccgagtctttaagcgtacccacccggatcacgcagtcgaagccttcgcgcaccacatcgaccagccggtcgctactgctcagttcgatttcaatgccgggatactgttgtaaaaacgcgggaagtttcgggatgaccagttttttggcgacgctgatcggcatatcgacacgcaggcggccgctaatgctcgacggatcgccctgaaacataccatccagctcttcgagattacttaacaggtctttggcgcgttcgtaatagaccatgccgtcctgcgtcaactgcacccggcgggtggtgcgatgcagcaggcgagcgccgagatggctctccagcgcctggatctgtcgcgatacgctacctctaggcaagcgaagggtatcggcggcgcgagagaaactctccagttccgcgacgcgaatgaagagttgcattgcgtgaattttatccatacctaccgtctattgttgttattaatgaaacagtaaaacgtaatttagcctatttattgtctctaagtctgctaataagctctttattcacacacacgtaatgacgaaggggtttctgatgacacaacgtatcgctttagtgaccggcggcagccgcggtctgggaaaaaacgcggcgctgaagctggcggcgaagggaaccgatattatcctaacttaccacagcaaccagcaggcggcgctggaagtggtgcgtgaaattgagcaaacaggagtgaacgcggcggcattgccgctgaacgtcggcgatgccgccagtttttctggctttgtgcaacagctgacccaatgcctgaaggagaagtggcagcgcgacagcttcgattatttattgaacaatgccggcatcggcttaactgcgccgtttagcgagaccagcgaagcgcagtttgacgagctgatgaacatccaccttaaggggccgtttttccttacccagcagctgctgcctttgctcaaagacggcgggcgcattctgaatgtctcaagcgggctggcacgctttgcactaccgggctattccgcttatgcggcgatgaaaggggcgatggaagtgttaacccgttatcaggcgaaagagctcggcgcgcgtgggatatcggttaatatcattgcccccggcgcgattgagaccgactttggcggaggcgcggtacgtgataatgcccagatcaaccagcatattgccgcccagacggcgctaggccgcgtcggcctgccggatgatatcggcgatgctattgccgccttgttgagcgacgagcttggctggatgaacgcccagcgcgttgaggtttccggcggcatgtttttataatgaccacgccctgcgcataatggcgtagggcgccttcatattgtgcgttttattattccgtaacactctttcgcattatgcgtatcgctgattttcagcggctcgattacactggaagaaataatattatattcctgttagctatccgtttaattaaggaattcctcatatcaaatgtaataaatattatgaatgagtaatcgttacgagctggcgtgtaactattcatcaccatgatgtttatatcatctactccatcggtacaatggcttaggtcatacggcgagttcttatttttgctggctgatattacccttcccccactttttaaggggatttttcgatggagagcagtccatgcaagtaatcatgtttgacaggcagtcaatatttattcatggaatgaaggtcggcttacaacaacgtattcctgaaattaatattcatagcacctgccaggcagaacagctgtggcaactgctcacggctcatccgcaggcgctcctcatgcttgatggcgacctgaacagtgaattttgttgctggttgctccaggagaagcagcagcgttttccgcatgccaaagtattattagtggtttcggatgataataaaagctggctgcagagagcgctggcgtggaacgtgcgcgccattgcccaacgtgaggatagtgccgatatgtttgcccagatcattaatagcatcatgttgggcatgatgtgtctgcctggcacctggttaatgacttcggcggatcgcggaaaacacgctgtgcatctcagccgtcgccagcaggaaattttaaaactgctggcggaaggcagctctaataaggaaattagccgtacgttaaatatcagcgccgggaccgtgaaagcgcatcttgagtcgttatatcggcggctggatgtcaaaaataggacccaggcggcgatggcatttaatagcatcggtgaaaattaactggtctgacaaaaccactcgcattcctgcaggcggaaggcgttatcgcggtcaattttccgccatatcgccagcgcctgcgtcatgttgtggccgttaagataatgcaaaatagcgtccaactccggctgggcgctgccatccaaactgaataccagcgccagcacggcatcgcactgcggctgagtcagttccacgaccaacctgcgctgtaatatctgttggcactgcaacagatctaccgtcaatagcatcatcgccagttcagcggtgatgggcgtctctttctcatcttcaccaatagcgtggccatagccgacccgccattgcccaaacctgtcctgatacggcagtagcgccagcccttgcgtctgctggataaaacgcaaccccgccaggcttaacgtggtgacagtcatggtcttttcctctgttgttggcggcagtgtagaggaaaagcggggccgcccccattcgccggatggcccaggccttattggtaatcgtggcgcatcaggccaaacagccagtcattgtgccaacggccatgtaaccagtagctctcgcgtagctctccttcctgaataaatcctgtttttagcagcagctgtcttgaggcctggttcccggcggtgacgctggcggtaagacgacgaatgccgcctgtagaaaatgcgtaatcacatagcgcacacagtgattcatatccatagcctagcccctgcgcctgtggggcgaagagaaagcctacttcggcgatatcatcatcgtgatggcaatagccggtcaggccgaggggcgtatggctttgccgatcgcgaaccaccaggcatagccagtgcgaggacttaggcgaccagagcggcaggcgtgcatcaaacgcggcgcggatatcggcgatgggccggttatccgcaacatagagcatcacctgcggatcctgttgcaggctgagaaaaaaagaccagtcgtcaagctgcagcggcgagcagcgcagccgcggcgtaagcagttcgggcatattgtcggctctggcaaagggaaaataaaaccttagcagcacagccagccgacggaaagtgccttatgaagacctcggctcgccgtacaggctgatgagccgccgcacgacgccgttggtccagccgaagccatcctgcagcggatattccccgccgccaccctcatgggggacgccgctggcgatatgatatttctcaatcagcttgtggtgtttgagataaaattgattcaccgtctgcagccagctctgggcgatttcatcgccaagcgggtcgtggccgtacattttgaatccctgtaccgccatccactgcagcggcgcccagccgttgggtttatcccactgttcgccgctttcatattccgtcgccatgatgccgccaggggtgagcagacgcgcgcgtacggcatccgccagccgttcggcctgggcgtgggtcgccataccgacatacagcgtgacgatgctggcggcggagaacaaggccaactgctcacggcgccaatcgtaatcacgaaaacagccgcactcttcatcccacaggtagcgggtaaccgcctcccggcgaacgttagctttacggcgaaattcagcttcagcctcgcgatcgcccttcaggccggaaagattggcgatggtattttccagcttaaacagaaaagcgttgaggtcgatgggaataaactgggtggtgcggatacttgcaagcctggtgatatcgcgcagccagcggctggagtagtcccagccggaagccgcgccggcgcgcaggtcgcgatagacctcgttcggcgggcgaccggaatgcttcgcggtttctacatcttctcgccaggattcatcgcgcggcgtatcgcgatcgtcccagtagcggttaagcagcgaaccatcgggcatacgcaccacgtgacggtaggcctggttagggatcagcgattccgcaccatccatccagaaggcgtgctctaatttgagatggtcgagatagcggcgcgcgccgcgaacgccatcttcctcaaacagctccaccatcagggcgaataccggcggctgggagcggctgagatagtaggtgcggttgccgttgggaatgtggccgtaggtttcaatcatccaggcgaagttgtcggccatgcatttgagcaaatcttcacggccgctttccgccagccccagcatggtgaagtaggaatcccagtagtaggtctcgctaaagcgcccgccggggacgatgtacgactgcggtagcgccagcagcgatgaccacggaatatgatcctgcggttcacgtgtgagcaccggccacagcttatcaatgtgttcttttagcgtcagtttcgggtcagaggtgtactcatcggcgtggttatctggcaaccagaagttgtcttccacaaactgacgcaaatcgaactccggcgtacgcttaacccgccggtaatgcatcagtatatccagcggatcgtgtttcggcgcgcagtcgggaaaggttttactatcaagaaaaatgcgcgacttttgtacgttagtaaacaactcgagatagcggtcggcgggggtcagggcgtcagacgccggtagcccttcgatgatctccggctccggttcggcgtcgaacatttcatccagttttaactcatacggatcggcttcgtagcacggatcgttttcgatcctcaactcgtcgtcatcaacgttgcgtagtttctggctgaacatagcgatacaggcctccggatagcgtgagtttaggggccgggcatgcccgggctctctaataagcgtagacactcgcttcggtctgcggaagataaactgtgcgtcaggtcacgcttttcagtgcataaaaatggcaggtaagaagagcaggtctttgaaatcaaagggtgaatatttaccgttgtcgtggatgcgcgaaaacgaaattcggagcattcattatgcaacaaaatttgaaccgccccgggtaaacgcaggcggttggctcgtttactcccaggcggcttccagcatctccagcagttgctctgactccagcgtgaccggattggctttcatcgacgatgaactactggccgccagcgcggcgggttccagcgcttcacgcggcacgccgaggtcgcgtaaattgccgagccctgagcgctggctccattcgcgcaggctttgccaggcgtcatccggcgagacgccaagtccggcggcgatccactggcgcacgtcgaggaaacgctggcgcagcgccggattggttacctgcgactcattgagttccagcccaaagggcagcaggcagccgcagagcgcgccgtgggaggcatcgcttagcccgccaagcggccccgcaagaccgtgaaccacacccagcccggcattagccagcgccagcccgccgcacaggctgacccatgccagctcgtcgcggctgtcggcacactctttttccatcagcgtttttaacgcggcgatgccgcgggggatcgcttcccggcacagggcatcggtgaagggcgtcgcccgggtgcacagccagggttcgataacctgagttaaggcatcaaggccggagccgagggtgacggcgcggggggcgttatccgttaacgccggatcgacaatcgccagctgcggcagcatgcgatcgtcgcgcaggctaactttgcgctgctgctgcgggacgttaatgaccgcgtttttagtgacctccgcgccagtgccggacgttgtgggaatagcgacaaacggtagcgggctggcttccagtattctccccgttccgacgacttccagatagtcgatggcaggcccgcttgccgggaccagcgcggcaatggctttaccggcatcaatgaccgcgccgccgccgatgctgaccaccgcgccgacgccgcgctcgcgcgccagccgtactccgcgttctatatcgtccagcgtgggttcattggcgatagcaaaagtgctgacctgaagatgcaatgcggtcagttcgctcagtaaaaactgggcgcggcttttggtcgcgccatgaaccagcagcaccggggcatcatattgcgccagccacggcgcggcgctgcgggcctgcccgcggccaaagcggatattgccggacgttaaaatgttgaagggagtgaccatgtgtaagggtacctgtagtggataattattctgcaatccactatacacattatccggcaagcttcatgtctgccatattacgaaaaagggttgctgaagatgataagaatcttgggtaaacgctcgtctattaacgtgcgtaaagtcctctggacctgcgaagaggcgggtatcgagtatcagcaggaagattatggcagcggctatagcccgcttgatactccggaatttttggcgctgaatccaaatgcgttagtgccggtgctggtggatgacgattttgtcctttgggagtcgaacagcatctgccgctatctggcgcgtaaggtcggacgtgacgatttgctgccctctgcgttgcgggccgcggcgcaggtagaacactggatggactggcaggcgacggagtttaacagcgcgtggcgctacgcgttcacggggctggtgcgtaaagatccgcgttttcaggatccggcggcaattaaagagagtattgccgcgtggacgcgctgcgtacagattgtcgacaaccagttacagcgcaccggcgcgtggctgacaggcgagacgtttacgctggcggatatcgtgctggggctttcggttcatcgctggaaaatgacgccgttcgcccatccggagatggcaaacgttgaacgctggtatatggctcttaaccagcgcccggcatttatgcgccacggcaataacggcgtagcgtagcggctgatttagcgtcgcgggcgggtactgcccctgacgataagcttcccctgcagaacgtgctgaacggcgctggtttcagccgcgcctagctgcgttttcagtacggcgatggcggtatccaccatttccgatagcggttggacccaggtggttaaatttatcagcggccagctggccatggcgatatcatcgaacccgacgatggagatatctttgcccgccttcatgcccatttcgccgacaaccacattgagggcggcgatggccatcatatcgttggcgcaaaatagcgcgtccggcggcgttggtagcgccatcagcctgcgggtggcgttcatcgcttcttctatcgaccacattccgctatcgcgcagcatcgggcgggcgccgcgggcctccagacgctgtcgaaagcctgtctcacggtcgcggctggtagaggaggtatctctaccggcaacaaatgccagctgctgatggccgagatccagcaggaaatcggcaatcgcggcgccgccagccaggttatcgctggtgacgctggaaaccgaccggctgtcgtttttgcggttgagtagcagcaccggcaggccgagctgctggcattcatgagcaaagtgtgaagaaaggctgctggacaccagcactagcgcttcaacacgatgacgcagaatctcttccatgatgggggtagtgtcatcatcgcggtacatcgaaaacaacagtacccggtatcccatcaggttcaacgcctgtaacagttcatccagaaccgcggcgtagaagggattcaccaaccccggaacgacaacaccaataagcgttgagcggcgggtgatcagcgactgggcgataaagctcggacgatagcccagctcggcggcgatcttacgcaccttttctttggtggctggcgaaattttcgctccttcggtaaaggcgcgggataccgcagattgcgagacgccagccgctttcgcgacatcgtaactggtgactgctcgtttgttttgacctgccattccgttgcctctcctgacccatgccccgtcattatgcgtgaatcttccccctgtcactaattttgcgatcttcgttgcattcgaatgcattgctgcttcacataacatttcattcgcgccaggatgcaagtgaattcgaatgcattagcatttcattaacatcatagtgaggcaagttatggctatctggctcaagcgcggtgcggaatctgaagcagtgaaatctcacgaccgtacggttcgtgaagcggtagagaaaatcctggcggatattgaagcgcgcggtgacgcagcggtgcgcgagctgtcgattaagttcgataagctcgatcgcgcaaacttccgcctgtcgcagcaggaaatcgatgactgctatgcgcaactgtcggatcgcgatattgctgatatccgctttgcgcaggagcaggtgcgtaacttcgctcagcaccagcgcgacagcctgaaagatatcgaggttgaaacgctgccgggcgtcattctgggacacaaaaatattccggtcagcgcggcgggctgctacgtgccgggcgggaaatacccgctgctggcgtcggcgcatatgtcgattatcaccgcgaaagtcgcaggtgtgccgcgcattgtcacctgtgcgccgccgtttaacggtaaaccggcgccggcgattgtggtggcgcagcatatggcgggggccgacgaaatctactgcctggggggattcaggccgtggcggcgatggccgtcggtaccgagagcatcgcaccggttgatatgctggtggggccgggcaacgcctttgtcgctgaagccaaacgtcagctgtttggccgcgtcggtatcgatctgttcgccgggccgacggagaccctggtcattgccgatgaaagcgtggatggtgaaatctgcgccaccgacctgttaggtcaggctgagcatggtcctgattctccggcgattttgttgacgacctcggaaacgctggcgcgcgaaacgctggcggaaatcgatcgtctgctggcggtgctgcccaccgcggaaatcgcgcgccagtcgtgggcgaagtttggcgaaatcattgtggctgaagaccgggaagaaatgctgaaaatcgccaatgagctggcgttcgaacatgtgcaggtaatgacccgcgacccggactggttcctcgaaaatatgcagaactttggcgcattgttcctgggacctcgaactaacgtggcctacggcgataaagtcatcggcaccaaccataccctgccgacgcgtaaagcggcgcgttataccgggggctgtgggttgggaagttcatcaaaacctgcacctatcaaaaggttcttaccgatagcgcctccgcgcagatcggcgagtactgttcgcgtctgtgcgccctcgaaggtttctccggccatggtgaacaggccaacgtccgcgtgcgccgctacggcaataaagacgttccttacgctgggattcctgaataacccgtaaggtctgaaacgggaagcgggatacgctccccaacttaacatcggccgcccgataacaaggaaataagcggcggccatgctgacggataaccctatggacgtattgattgccttactggcgttaggattgctgatgctcgccgcctatcgcggctatagcgtgatcctttttgcccctttggttgcgctcggcgccgtattactcacccagccagccgccgttgccccggtattcagcgatattttcatggataagctggtcgggttcgtaaaactctatttcccggtatttttactgggcgcggtcttcgggaaattaattgagttttccggattctcccgttcaatcgtgagtgctgttacccgactaatgggacaaaacaaggcgatgccggtgattattctggtctgcgcgttgttaacctatggtggggtttcgttattcgtggtggtatttgcggtctatcccttcgccgctgagatgttccgccagagccaaattccgaaacggctaatgcctgcgactatcgcgctgggtgccttcacttttacgatggatgcgctaccgggttcgccacagattcagaatattattccgactaccttttacggtacgacctcttgggcggcgccctggcttggagtactgggctctgcgtttgtggctattggaggctggttatatctggaggcgatgcgccgtaaagcgcagcacaggggcgagggttatggaagcgagctcgtgaatgaacctgaaaccccggcagaccttaatttgccgcatccgatgatcgcgctgctgccgttgataatcgtcggcgtcgccaacctgctgttcacctggcttattcctcaggcgtacggtagccatttcctgattgacctgccgggactgaaagcgccgatggaaagcgacgtgaagaagatggtggcgatttgggcggtgatggcggccttgttgtgcggaattatcactatcttcctgtttgccgggcgtagcctgaagggtaagctggccgacggtagcaaagtcgccgttggcggcgcgatgctggcggcgctcaataccgcatcagagtatggttttggcggggtgattgccgcgctaccggggtttgttcaggtggcggatgcgctgaaagcgatcccaaatcctttactcaatcaggcgattacgatcaatattttgtccgggatcaccggttcatcctccggtggaatgagtattgccctggcggcgatggcggaccgctttgtggagtcggcgcatgctgcggggatcccgctggaagtgatgcaccgtgtggcgtcgatggcggcgggcggcatggatacattgccgcacaatggcgcgatcatcactctgctggcggtgaccggactgacgcatcgccaggcctataaaccgattctcggtatcacgctgtttaaaatcctcggtgcctttttcattatcggcatttactacgccaccggattggtataaagcccgggccgtcggctatctgtgccgacggccttatttatttttcagcgtattcgctttgcgccggcgggataatgccgctacgatccgcgtctattttttatctcatcccaaaaacgcgcggcaggtaggtgaagtttgaacaggcggttaggccttgtgctattggcattactgttggtttcaggctgcgccggcacgctgtcgcaaatgagccctcccagcaatgaaaccagcctggtggggcataacgggcagcggctttccgtcgatactttcgtcagccaatacatgcgcgagaagcaggtcagcggcgtggtggtggcgattattcatcacaacggcccggcggagtttcactgcttcggcgtgacggatgataagcagcgctacccgataaccccgcaaacgctttttgccctcggttcgttaagtaaaggtgttaccgctgaagtggtgacgatgctggtcaacgaggggcgtttgcactggagcgatacgctgcaaaccctcctgccgccggggaccgtcctcagcgacgatgcccgcaagataaccttgctgcagctggtcacccatacctccgggctgccgcgtcagccgatgaacatgctgtcgcttgagcatctgttggcctatctcaacaacggtgaaaacttttatcacgaacttgatgccgacggcgtgctgagctatctgagcaacttcaatgcaccgctggagcgggagcctaattactccaacctgggctttgcgatacttggatatattctcaaataccaaaccggtgaatcgattgagacgctggcttcacggatgatcttccggccattggcgatggggaataccagcttccagccgcaaacgttgcgcgaatatccgtggcgggcgctaggacacgcaggcgatcagccgaagtttaaaccgcgcggcgcgctgacgccggactggcagttcacgaataacatggttggcgcggcgagtctgtacagcgacgccggcgatctgattaactatgcccgcgctcacttcgccccacggggcaggcggcactggatcaggcgttcaaagacgttagcgtcgattattatccgcgtcgggtcgaagcggcgaacattgcctgggtgaccgacacatttggtcggcagcgattaacttatcaggtgggttacatcggcggctattcgagctatatcggtttcgataaagcgaatcagaatgcggtggtggtgctgcaaaacagctttaactggagtaactatatcggccatcagatcctacgtaatctggtgacggagtcaaaatgaagccccgtcctgagacggggctgtgcggattaacgcatggtgacaaattcttccgccgccgtcgggtgaatggcgacggtgttgtcaaagtcttttttagtcgcgcccatcttcagcgccaccgcaaagccctgcagcatctcatccattccgaagccgataccgtgaataccgacaatcttctcttccgggccgacgcagaccagcttcatgcggcacggctggcggtgagaggtcacggcggtatacattgcggtgaaggacgatttgtacaccttcacggcgtcgtcgccgtactgctcgcgcgcctgcggctcggttaagccgacggtgccgattggcggatggctgaagaccacggtcgggatattgctgtagtccaggtgctcttccggcttgttgttaaacaggcgttcggacagacgacggcctgcggccacggcgaccggcgtcagctcaacggcgccggtattgtcgcccaccgcgtagatacccggcacgttggtgttctggaacttatcaacgatgatgtagcctttatcgttggttttaacgcccgttgccgccaggttgaagttatcggtcgccggttcgcggccaatcgcccaaatcaggcaatctacggtctggctgcggccatcttccagctccagagtcaggctgccgtcggcattcttgactaccgctttcggaatagcgttagtgtgcaactgcggaccttcggcgttcatcacttctaccagggtctcaacaatcagcggatcgaagctgcgcagcggcgcgtgtttacgcacgaacaggtgggtttcggcgcccaggccgttaatcacgccagccagttcaacggcaatatagccagcgccgactaccgccacgcgcttcggcagcgccggcagttcgaagaaaccgtcggaatcaataccgtattccacacctggaatgttcgggtggctcgggcggccgccggtagcgatcaggatatgatcggcggtaatggtctcgccgttgacttccacggtgtgagcatcgacaaagcgcgcgaaccctttgataacatcaacgttattcttacccagcacgttgtcgtaagaggtatgaatacggtcgatataggcgctgcggctggcaaccagcttatcccagtcaaaatggttgatggtggtatcgaaaccgtaatccgggccatacaggtggattgcttcgcggatctgcgccgcatgccacatcacttttttcggcacgcagccgacgttaacgcaggtgccgcccagctctttggcttcaatcagcgcgcacttctggccgtacatcgccgcacggttaatcgaggcgataccgccgctgccgccgccgatggcgaggtaatcataatgtttgctcatgcccatatgtccttaatcgttaattgccgcgattgtagcgcgaggcgtaaaaggttccaccgatggttgcgattactccggtacgatccaactcacggtcgcatgaccggtaccggctggaaccagtttgctgtgcagccacggcagcacgttattcatctgctgttccagcttccacggcgggttgatgacgatcatcccggaggcggtcatgccgcgctggtcgctgtccggacgcaccgccagctcgacttgcagaattttgcgaatacctgtggcttctaaatctttgatcatgcgtttgatttgcgcgcgcagcaccaccggataccacagcgcgtaggtgccggtggcgaagcgtttataaccttcgttgatcccggtgaccaccgcctgataatcggttttaatttcatacggcgggtcgataagaatcagaccgcgacgggaaaccggcggcagcttggccttcagctgctgatagccatcggctttatcgacgcgcgcgcggctgtctttctggaactcggcgcgcagcagcgggaagtcgctcgggtgcagttcggtcatctgcaggctgtcttgctcgcgcagcagctggcgggcgataagcggcgagccagggtagtagcgcagctgaccgctgcggttgaagtgttcgacgaccgaaatatacggctcaagctcagtcggcagatcgtcttgctgccagatgcgggcgatgccttcaagatactcgccggtacgttcggcgtgctcgccgctcagctgatagcggcccgcgccggcgtgggtgtccaggtagagaaacggtttttctttctctttcagtgattcaatgatcaaactctgaacggtatgtttgaggacgtcggcgtggttgcctgcgtgaaagctgtggcgataactgagcatggatgcagagattccggaaataaacaagttaaccgacagtttaccgcagttcgcccaggattgccgctgtcgcaccgcctgtcattgaaattcacgcaactatcccccattctagatctcatgcaaaagcgccggaacgcgcgcttcattcaccctcttcaacaggacagcgcatatgaccaatccattactgacgcctttttcattgccgccattttctgcaatcaaaccggagcacgtggtccctgcggtcaccaaagcgctggatgattgccgggccgcggtggaaagcgcggtggcgcacggcgcgccgtatagctgggaaaatctttgccagccgctggcggaagtggacgatgtgctgggacgcatcttctcgccaatcagccatttgaattcggtaaaaaacagcccggagctgcgtgaagcctacgaacagacgctgccgctgctctccgagtacagcacctgggtcggccagcatgaaggcctgtataaagcctaccgcgacctgcgcgacggcgataactacgccacgttgaataccgcgcagaaaaaagcggttgataacgcgctgcgcgattttgaattatccgggattggcctgccggcagaagcgcagaaacgctacggtgaaatcgccgcgcgcctctctgaacttggcaatctgtacagcaacaacgtgcttgatgccaccatgggctggaataagctggtgaccgacgtcgccgctctcgctggtatgccggaaagcgcgctggccgccgctcaggcccaggcgcaggcgaaagagcaggaagggtatctgctgaccctggatatcccgagctatctgccggtgatgacctactgcgacaatcaggcgctgcgcgaagagatgtatcgcgcctattccacccgcgcctccgatcagggcccgaacgccgggaaatgggataacagcccggtgatggcggagatcctcgcgctgcgtcacgaactggcgcaactgctgggctttgacagctacgcctttaaatctctggccaccaaaatggctgaaaatccgcagcaggtcctcgatttcctgaccgacctggcaaaacgcgcgcgtcctcagggcgaaaaagagctggctcaactgcgtgctttcgccaaagccgagtttggcgttgatgaacttcagccgtgggatatcgcttactacagcgaaaagcagaaacagcatctctacagcatcagcgatgagcagctgcgcccgtatttcccggaaaataaagccgttaacggcctgtttgaagtggttaagcgtatttatggcattaccgccaaagagcgtaccgatgttgatgtgtggcatccggaagtgcgtttcttcgagctgtatgacgaaaataacgagctgcgcggcagcttctatctcgacctgtatgcccgcgaacataaacgcggcgggcgtggatggacgactgcgtcggccagatgcgtaagctggatggttccctgcaaaaaccggtcgcttatctgacctgtaacttcaaccgcccggtaaacggcaaaccggcgctgttcacgcacgatgaagtgattaccctgttccacgagtttggccatggtctgcaccacatgctgacccgcattgataccgccggcgtttccggcatcagcggggtgccgtgggatgcggtcgagctgccgagccagtttatggaaaactggtgctgggagccggaagcgctggcctttatctccgggcattacgaaaccggtgaaccgctgccgcaggaactgctggagaaaatgctggcggcgaaaaactaccaggcggcgatgtttattctccgccagctggagttcggtctgttcgatttccgtctacacgcggaatactcgccggagcagggggcgaaaatcctcgagaccctggccgagattaaaaagcaggtcgccgtggtgccgggcccaacctggggccgcttcccgcacgcgttcagccacatctttgcgggtggctacgcggcgggctactacagctacctgtgggccgatgtgttggcggcagatgccttctcacgcttcgaagaagaggggattttcaaccgtgaaaccggtcaatcattcctcgacaatatcctgagccgcggcggttccgaagagccgatggagctgttcaaacgcttccgcgggcgcgagccgcagctggacgcgatgcttgagcattacgggattaaaggctgattgctacgtgaagatctgcttaattgatgaaacaggcgccggtgacggcgccttatctgttttagccgaccgttggggctggagcatgatactgagaatccgatggcgctggtgctgacggacgcgcatctggaactgcgtaagcgcgatgagccaaaacttggcggcatctttgtcgatttcgtcggcggcgcgatggctcatcgccgcaagtttggcggcggccgcggcgaagcggtagccaaagcggtgggtattaaaggcgattatctgccggatgttgtcgacgctaccgccggcctggggcgcgatgccttcgtgctggcgtcggtcggttgccgcgtacggatgcttgagcgtaatccggtggtcgccgcgctgctcgacgatggtttgaaacgtggctatgccgatgcggagatcggcggctggctgcaggagcgcttacagctgattcatgcctccagcctcaatgcgttgaccgatatcaccccgcgcccgcaggtggtgtatctggatccgatgtttccccataagcagaaaagcgcgctggtcaaaaaagagatgcgggtatttcagtcgctggtggggccggatttagacgccgatggtctgttggcgccggcgcgacagctggcgaccaaacgagtggtggtgaagcgtccggactatgcgccgccgctggcggatgtcgccacgccgaacgcggtggtgaccaaagggcatcggtttgatatttatgccggtacgccggagtaaatttgcaataccggtggttcctcccggatgacggcgtaaagcgtcttatccgggctatcgaattgtagcccggctcagcgtagcgcaagccgggaatcgcaatatttaaacaaacggcgccagcggatcggccatcttagatggttactcggcgctagctggggtattaatcatccggttcagccacggcaccataaaggccatcaccaccgtcaccgccagggtcacgaggccaattttactgaacacgttggtgtagatcggcagcgtctgcagcgggtcggttatattttctggtaccgcggtgaaggtcgcgacatagccgcccatcaggaacgcggcggcctgagtcaggaaccacatccccagaataaagcccatcagccgctgcggaaccagcgcggcaaccatcgccagccccagggcgcttatcagcagttcgccgagactctggaacagataaaccagcacgataaaccatggcgaggtgagcccctgcgggtcggcaaaccacatcccggccgccgcggcggtcagaaagcccagcgcgcagaggaacatcccgagagtgaatttcatcggcatggtcaggtctttacctttgttgccaagacgggtgtagatagccgccagtaccgggctggcgaccaccacccagaacgggttcaacgcctggaaactcaccgggttaatcgcgatgccgagaatgtcgtgatgcacgttattgatggcgaagaagtttagcgaggttggcatctgggcatacaggatataaaacaccaccgcttcgagcatcaggatgaaggcgacgaacatcttgttgcggccggttttatcgaggcggaaagcttcgcggaagaagaaaatcgtcaccacgatggacagcacaatcagcaccaggttggcgattttaacgttatgcatcagccaggcgcagaggaaaatcatcaccacggtgccgaccagcacatacagcagattacggaaactcagcggctgatgatccggggttgaaccgatatctttcaccattccgcggcaggcgaagtagaccagcagcgcgacgataagcccggcgccgcacagattgtaggtcaccgcatagccgaacttatcggcaataaccggcgccagcgacagcgacagcagcgaaccgatgttaatcgacatataaaacagggtgaaggcgccgtcgagacgggcgtctttaggcggatagcattttgacagcaggctagctgggttggctttaaacagcccgttgccgacggcgatagtgccaagcgcgataaagataaggtcgggtttgagcagcgataggccggtcataaaatagccgattgccaacacgatggcgccaagcaccagcgtgcgtttagttcccagcagatggtcaccgacatagccgccgatggaaatgaggccgtagaccagcgccgcgaaggcgccaaaggtgataaatgcctgttcctgagagaaaccaagctgtttaacaaagaacaccgccaggatgccctggacgccgtaatagccaaaacgctcccataactctacaaaaaagatcatgaagaacggacggggttgctgcagcaaacccgtaggtgcagttgttttcatattccttcgccttttagtgctatcccaaaaagtatgaacgcgtctgccaaaacgcgccgaaaaagtctgatgacccatgatgatgcggccattggctgaatgtatagattattatatagatattaattctaataaatggttgatcacactaaccgatattaattatctggattgatatcctgatgtggtcggtgcgcttcaggcgggatacagcataaaaacaaaaacgcccgcaggcgcgggcgttggctggcgaggagaagcggattattcgtcttcttcgtcgcgcagcggtacgatcagcatatcaacgtgaacggtgttgatcagctgacgcgcggaggacatcagcttgctccagaagtcctgatggtgaccgcagaccaccaggtccatatcatattttttaatcgcgtcgaccagcacctggccaagatcgccgctaccgctcagggtttcggtaattgggtagccggcattggtggagagctccgtcagcgcgtggtgcgtctcttcagagatgcgtttctgcatgtcgcccagattgacatcgataagaccggtgtagaggtcggagtaattcacatccacgtgaatcagggaaactttcgcattgtaggggcgcgccatagaaaccgctttctctaccagcactttgctttccggtgataggtctactgcaataagaatgtgtttgtaagccatagtgttactccttccataagttgtcgatgaccgttggaccagacagactgtgctgtcgattcgcccgcgtcctgcaagctagattcgcggggggtaagcctttaaggacttaattgtagaagataatttctacaatatagcgcccctcgcactccgtcaatgcacctggttcaccgttagttaaacaaattattccgtcttacgtattgataacgattaaccttgtggtaaaaaaattaactgatctcctacactatttaatgagccggtcggataaataaacgtgaccggaatcgcactcttttactgtacggtgggttggatgatattggggagcggtagtcccggagggatctccgtggatgggtcgccggggaggaagtatgatcagcactgttgcgctgttttgggccctgtgtatcgtttgtgtggtgaatatggcacgttacttctcatcgttgcgtgcattattggttgtgctacgtggttgcgatcccttgctctatcaatatgttgatggcggaggttttttcacctctcatgggcagcccagtaaacaaatgcggctggtttggtatatctatgcccaacgatatcgcgatcatcatgatgacgagtttattcgtcgctgtgagcgtgttcgtcggcagttcatcctgaccagcgcgctgtgtggtctggtgctggtgagtatgattgcactgcttatctggcattgagctgcctgaattgagtgcaaaaaaaatgggccagtttcctgacccatttttcgcatgactattgcttagataagcttcagagccagccagtacagcacgcctgacagcaaaatggctgccggcagggtgagtacccatgccatcaggatgctggtgacggttttcttctgcagaccgccgccatcaacgagcatcgtccccgcaaccgaggaagagagcacgtgggtggtggaaaccggcatgccggtgtagcttgcaaggccgatagacaccgcggcggtcatctgggcggacataccttgcgcgtaggtcatacccttcttaccaatcttctcgccgatagtggtcgccacgcggcgccagccgatcatggtgccaatacccagcgccagcgcgaccgccataatgatccagattggcgcgtactcgatggtgctcagcatatcggttttcagtttcttcagcagtcgctggtcgtcagtgcttacatccggcagtttggccactttgtcggtggtgtcggagatgcagagcataatacgacgtagttggccgcgctgatccactgacagtgtatcgtagctttccgttccggtgagcatcgtcttcacgcggtcaagcgcgttaatggtgttcgccggatggcagtgaaactcgccgttggccgcgatgttggtttccggtgacggaaccagttgatcaacgccggtggctttcttcagcagctcagggcgctgttggaagaaggtttccacgttgttgaccgcatcgcgggtacgagtgatttcgtaaccagatgcgttcatgttgaccacgaatcccgccggcgcgacgccaatcaagaccagcataaccagaccaatgcctttctgcccatcgttggcgccgtgcgagaacgacacgccgatagcggacaggatcagtgcgatacgggtccagaacggcggttttttcttaccgtctttcttttcgcgttccgctggggtcaggtggatacgagcgcgttttttggtaccgctccagtaacgacgcagaatgaaaatcaggccgcccgctaccaccaggccaacgatcggcgagacgataagcgaggcaaaaatgccgatgactttcgggatattcagcgcatccaccactgaagtaccggtcatcagcgcattggttaaaccaataccgatgatggcgccaatcagggtgtgagaactggaggccggtaggccgaaataccaggttccgaggttccagatgattgctgccagcagcatagagaacaccatggcgaggccatgtgcggaacccatgttaagcagcaggtccgttggcagcatatgcacgatggcataggctacgctgagaccgcccagcagaacgccgaaaaagttgaagagtgccgccatcgcaacagcaagctgcgaccgcattgcgcgagtgtaaatcaccgttgcaactgcgtttgcggtatcatgaaaaccgttaatcgcttcgtaaaacagtacaaaagctaaagcaagcaataataatagtccggtatgtaaatccagaccggcaaataaatgtagcataggacgttacgccattttgaggacatgaacgcggcgcattatcagtgactttagcggcgcgggcaaagtgaaatatagactttttttgattttcttcctgtttggtttctacccggttgggagtaatcctatatctttcaaagacgtaactgaatgttgtttttttcgtgctggtgtgaccagagtgaaatatttacaattcccgacaattggggaacgaggaaagttgagtggaaaggtttgatgccattgtgatcggcgccggtgcggcgggaatgttttgtgcggcgcaggcggggcagttgggctgccgggtgctgctgctcgataatggcaaaaagccggggcgtaaaatcctgatgtccggcggcggccgctgcaactttaccaacatgtatgtcgaacccgcggcatatctcagccaaaacccgcatttttgcaaatctgcgctggcgcgctatacccagtgggactttatcgaactggtcggtaaatatgacatcgcctggcacgagaagacgcttggccagttattctgcgatgattcagcggagcaaatcgtcaacctgctgttgtcggaatgcgaaaagggcggcgtacagatccgtctgcgcagcgaaattctcagcgtcgaacgcgatgaacaaggctatcggctacaggtgaacggagaaacgctggcggcgaagaagctggtaatcgcttccggcggcctgtcgatgccggggctgggcgcatcgccgtttggttacaaggtggccgaacagttcggcctgaaggtgctgtcgacccgcgcgggtctggtgccgtttaccctgcataaaccgctgcttgagcagttgcaggtgctttccggcgtttcggtgccctctacgattaccgccgagaacggtacgctgtttcgcgaaaatttgctgtttacccatcgtggcctttccggcccggcggtgctgcagatttccagctactggcagcccggcgagtttgtcaccgtcaacctgttgccggactgcgatcttgaggcgtttctcaacgagcagcggggtgctcatccgaaccaaagcctgaaaaacactctggcgatgcagctgccgaagcggctggtcgaatgtttacagcagcttgggcaaatacctgatgtgacactgaagcaactgaacgttcgcgatcagcagacgctggtagagacgttaacagcctggcgcgtgcagccgaacggtaccgaaggctaccgaacggcggaggtgaccctcggcggcgtagatactaacgaactttcgtcacgtactatggaggcgcgtaaagcgccggggctttactttatcggtgaagtgatggacgtgaccggctggctcggcggctataacttccaatgggcgtggtcaagtgcctgggcctgcgcgcaggcattggcggaaatttaatccgagagcccgggcaccctggcacccgggcttttttgatcagttcagcccaagaaaatactgggcgattttgaaataaataatcagcccggtgccatcaatcagcgtggcgataaacggcgcggaaaccaccgccgggtcgataccgatccgcttaagcaacatcggaataaccgaagacaccaccgcgctccacagggtaatgcagaccagcgtcaggctgacgatgagcgtgatttccatgccaatccccatcatccaggcgcgcaggcagcccgccagacccagggtcagggcaatcagaaacgaggtcgacacctctttgcggataacccgtcccatgtcacgtaagcggacttcgcccaacgccatcgaacgcaccagcgttgaggtaatctgagttccgctgttgccgccggtgccgatcagtaacgggatgaagaaggccagcgcgatggccgattccagcgcctcttcaaaatgctgcagcacgctgctggtgtaagcttcggctacaaacagcagcaatagccagaccgagcgtttcttccacagcgtccacggactgatttccagatacggtttttccagcggtagcgtcgccccctgcagttgagcgtcttcggtgacgtcatcctccagtaggtgggcaatttctttttccatcaggcagccgaccagctcgcctttatcgacaaccggcaccagatcgaggccgcgctcggtgagttcggcaatcacctgagggcgttcatcgtcgggtttgacgcgaaacagacagctgtccatcaggtagcgaatagactgtcctacctctgcctcctgcaaaagttttttgactgataagctgccgcgcagcttgttaccggcgacgacaaatacctggccgggaatatcgtcgctggcgagctgtgagataaagtgttcacgcgcctcatggacgctgaaatgttcctgcagcgtaataaagtcggtacgcatgtactgggcgatcgcatcgccgtcgaagccagaggtcgcctggtgcgcggcgcagagttgaatggaagacatgattaaaatccctataaaaaatcactcataggggcgaacaagacagggttagcgcaggcagatccctacgtcctggttttagcactgcataacgtatctgaacggttatgaccgccagaagttaccttggcaacaccttgattcgatggaagcctgtatttccctgagtggtctctctcgataccaacagggcggtaacttgtatttatgcaggagcctcgccataacgagatcgttaaatgaggcgccattattggcgaacagggataattaacaaagcgtatagtttatgtggtttatcaactgttgataaacaaagtttgcctggtaagaagttgacttcacattgtgctatcagaaaaatgatttcagtaggtgaactcatgcggcaaggaggggtaaaaccatgatcaaacctaaaacgccaaattcaatggagattgccgggcagcctgctgttatcaactacgtgcctgaactcaatgcattccgcggtaagttcctgggattatcaggatattgcgattttgtttccgatagcattcaagggttacaacaggagggcgagatatcattacaggaatatcttgctgattgtcgtgaagcgggcatcgagccttatgctcagccggaaaagctgaaaaccttcacattgcgctatcctgaatcatttggtgagcgtcttagctccgccgctgcagaggagcaggtttccgtaaatacctggatccttgagacgctcaatgaacgtctcaaacaggcttaaaacagtctgcatcaaattgccatcgttttaattatcatcccctaaacaccgcaaatgcccatgccgcacgccgcgctgggcaatcacctggtcggcaaaatgctgtacttcgtccatgttgcctttcagcaccgcgatctccagacagtcatcatgattgatgtggacatgtaacgtggcgaccgagagatcgtgatactgatgcgaagaggcgaccagccggctcgccagttcgcgtttttcatgctcatacacgtacgacaggaccgcatagccgcgctgcgccgcctgcggcagcggattgtggttgagcgcgtcacgcagaatatcgcgcaccgcttccgagcggttgtggtacccgcggtgggcgctgtgcgcgtcgagcgcggccagcagatcatcatccagagtcagggttacgcgctgcatggtatggcctcgttaagcagcgtgcggggaaagggcgggagtaccgcacgctgtagcgcctgtccggcagcggatgtaaggcgcagcggcagactaaccgcggccgtttcgacgatgcgtccgctatccatcaccagtacccgctggcaaaaacgctccaccagccgcaggtcgtgggtgataaacaggcaggcggtggcgaattgcgcctgcagacgtttcagcagggcgataatttccgcctgaagcatcagatcgagattcgataccgcttcgtcgagaattaatagctgcggacggaccaccagcgcccgcgccaggcacacgcgctgcagctgtccgccgctgagctgtgccggacgcttgttgagcagcgccggggcgaggtcaaccgccagcagcatttcctccacccgctgcgtacgctcttcacgcgataaactaaacaggtgccgcagcggctcgctgataatctcgcgcaccgttttacgcggattcaccgcgctaatggcatcctgaaacaccagctgaatatcgcggcgaaaggcgccgatcgcctcccccttcatggaggtcagcgatgcgccgcgccaggcgacatcgccataccgcggcgtttcgagaccgaccagcatccgcgccagggtacttttgccgcagccgctgcgcccgagcagcgccaccgtttcaccgggggcgatgtcgaactggatatcgcgcaataccgggccatgatgggggtaatcgtggctcactgcgtttacgctgagtaaattcatggtgttttctccaggccatacagcgccagatgggcggccagcaggcgctggctgagcgggtgctgtggggcgctaaatagcgtgttaacgtcgcagcgttcaacaagatggccattttccatcaccgccacgtcatgcgccagacgggcgacaacgcccatatcatgggtcaccagtagcagccctgcccgcggttggcgacgatatccgccagcaggtcgagaatgcgcgcctgggcgacggcatcaaggtcggtggtcggttcgtcggcgatgataaacggcgcgcggctgagcagggccagggccaccatcatcctttgcagcatgccccgctcatctcgaagggatagcgcttgagcagcgagagcggattttccagccccacttcttgcatcgccgccagcagcgcgacgttattggtctcgtggcctgccgcccggcaggtttcccgcgcgtgcgccgccatggtgtgcagcggattaaaggcgctgcgcggattttgcatgatagtggcgatagtggcgccgcgcagctgttcgccgtacaccgggatgccgtcgagcagcacccggcccgcggtttgcctgacgccgggcggtaaaataccgagcgtggcggcgcaggtcagcgatttaccgctgccactactgccgagcagcgccagcacctgaccgcggcgcagggtaagggaaacgtcgctaaccagcggacggtcggcaacgagcgaaagttgttccagttggatcttttgcggcatcagtggttatgctccgcgatcagctgaggatcgagacgatcgcgcagcgcgtcgcccaccaggttaaaggccatcacgctgataaacagcgccagtccgggccagaccatttgcagcggctgcgtccagatatactggcgggcgtcgttgatcatcaccccccattccgccgtcggcgcgctgacgccgaggccgaggaacgacatgccggccacgtgcagcatcatatgaccgatatccagcgaggcgagcaccagtagcgaagggatcaccgcgccggccagatggtcgcgaaacagtgaccaatggcccgcaccgctcagacgcgcggcgagaataaactcgcgctggcgcaaagagaccaccagattgcgcaccatccttgcgtaccaggcccagtgcgacagcgcaatggcgataatcacgttgctaagaccggtaccgagtacgccgaccataaagaatgacaatattgaggtcgggaaggtcataaacagctcggccaggcgcatcagaccgcgatcgacgcgtccgcccaccatcccggcggcgccgccgaccgcaaggccgatcagcagcaccagcagcaggcaggcaatcaccgcgcccagcgagacgcgggtggcggcgagaaggcgcgagaaaatatcgcgcccgagatgatcggtgccgagccagtggccgtcgcctggagagagcagacgttgatggagatcgatggccgccgggtcatagggcagccaccagctgctgctcatggcgattgccgccagcagcgcaataatgagtagcgccagttttaccggccagcggaaggtcgcgaacagcgtcatacggcggcctcctcatggcggggcaggcgcggatcgagcgcggcgttaagcaggtcgaccgccagattggccagcacgaacaccgccaccatcatcagggtaaagcactggatcaccggatagtcgcgattgaatatcgcggaaaccgcatagcgaccgacgccgggccaggcgaagatattttcgatgatcattgtcccgccgatcagctcgccgatgtgcatacccagcgccgtcactaccggcaacgtcgcgttacgcagcacgtgtcgccgctccacctgaccctcgctcagcccgcgcagacgcgcccagaccacgtggcgctggctggacacttccagcatgctggcgcgcagcagacgggcattgatcgccagcgacatcagggcgatggaaaacgccggtagcagcagatgtcgccagccgccgtagcccatcgccggtagccagcgcagatggacggaaaagaacattaccagcaaaaaggccagccagaagttgggcattgagacgccgaggaaggcaatcaatcgtacggcgaaatcgggtaatcggtcgcgatgccgcgccgcccagatccccagcggtagcgaggtcagcagaataatcaccagcgccgcgccggtgagctgcagcgtcgcgggcagaaaatacagcaggtcgtccagcaccggccgctggctggcataggagacgccaaaatcgagatgcagcgcgcgccacagccagtgtagatactgcagcgccagcggctgattgagcccgagctgctcgcgggtagcggcaatcatttcgctggtgggcggcacgttagagaggcgcagatagtccagcgctggatcgccggccccaagacgtaataacaggaagatgatcgccgaggcggcaagcagcatcagcggcagcggtagcaggcgacgaaggagatatttcaacatcatggggccaccggcgtaatgagctctaacggcagatcggtggtcaccggcgcgaagggcacttcgccgagcgttttgcgggcgacggacatcagcgagacgtagcttatcggcagatagaccgcttcgttgtgcaggcgggtgaggatatcgcgatacagctcacgacggcggccctcgtcggtggtggtcaggacctcaccgatctctttatcaatcactgctttatccggcagaccgcgctgcgcctgatagtcggcgtgcgaagcgacgcgcattgagctcataaacgcgtgcgggtcgaacggcgcgccccaggtatggttgaaaatcatcgtgaagcggccatcatgctggcgagcatagatactgctctcctcttcgccgaccagcccgacatcgatccctacctggcgcagatcggcctggataatttccgccatcgattttgccagcgcatcggtgccgataaaggccaggttaaggtgcaacggctggccgttcttttcacgaatatccttgccgggcgttagcgtccagccggcattttccagcagcgtacgggccttatccggattgaagcggcgcggcggcaggtcatccggcgcgtaaggtaccgagggcgcgaaaagcgtgtcggcgacctgttgggtgccatacagcacaccgtcaataagcgcctgtttattgacggcatagttaagcgcctcgcgtaccgctaaatcattcgttggcgcttgcagcgtattgagcgccagcatcacggtttgcgtcggggcggaaagacgcgtgtgatactcatcctgctggcgaaaacgggcgaatgtgtccagcggcagtagcccttcatcaccgtacagcagatcaacttcaccggtttcaaaagcgaccgcccggctggtggcgtcggggatcactttcacggtgactttctcaagcgccggttttttgccccagtagcgcgggttgcgtaccaacacatcttgttgattaagctgcgaactggacagcatccacggaccggtgccgatgggcgctttgatgcctcgctgcgtactaccgtcaacaaactgcgagggggcgataaagcgaaacgggcggggaagggcgagttcctgcaggaacgggtagtaggcgcttttcagggtgatttgcagttcgttatcgctgagcgcttgaacgtcggttatctgattggtcaactccagccaggcatgccgctggcggttggccagcaccgcctggaaattagccactgcggcctgggcgttaaaaggttcgccgttggagaagtagacgtcatcacgcagggtgaaacgccagattttaccatcggctgagtggatccagcgggtagccagccagggtgtaacccggccattggcctgatatttgactagcggctcatacaccatactttgggcgaacatttggttcggcgtatacagatgtggattgagaggaccgacgttaaccggccaggcgatggcgatttcatgcatggcggcgggcgcgagcaaaggaatgcaggcgcagagcgccagcaaggtggtgcggaaaatagacaaggtttacatccagaaggagcgaaaagtatgacgattttaataatttgtcatacttaaggagtaacctggatcaatatgatgggagaaaaccataacaaaatcatatgtagcgtaagattacgattgtctgaacaaatccagcagggtggtgacctgttcatcgagcggcgccaggtcccgcttcactatcaaatgcagcggcgtggcgcggcgggcgccatggttcagcggcagcgctttcagcacgccctgctccaggtgtgcgcggatccgttcctccggtagccagccgaatcccacctgatacagcaccgcatcaatcgcggcatcaatagtagaaaaggtccaggcatcgcgcgtggatgaggcgtcgccgctacggtcggcgatacggattagcggccagggggccagcgcgttgtcgtccagcaattcatccgattgcgacagcggatgatcgcgatgggcgaccgcgataaagtcgatattcatcagccattcgccgcgtccggtaatatcctggcgacgtgttaagaccatcacgtcggcctcgctgcgggcggcgcttgcctcatccacgttttccagcacttcggtcagccgaacctgagtttgcgggtagcgttgctgaaactgtcgcagaatggcgaagagccgctggcggggaaaaatgctgtcgacgaccagatccagccgggtgcgcgcgccgttgcgcagcgtcgcggcgtgggtctcaacccacgaaaaggccttcagcagcggtttcacctgattgagcagcagttcgcctgcgggcgtcagcaccgcccgccgcccggacggcgccagcagcgctacccctaaacgttcctgcagcagcgccagattatagctcaccgaagactggctgcggttggtctcttccgcggctttggcaaagctgcccagctcaatcaccttttccaacagcgcccattgttccagcgtggttttgtgcataattcatctaaaaattagattattttcatccaaacatagcgttattcattcaatttttaaagccgtattcttacctcaacgaaacagaggagaataaataatgagcactttcgacaaacatgacctcagcggctttatcggtaaacatctggtttatacctacgacaacggctggaactatgaaatttacgttaaaaatggcaccaccctggactatcgtattcacagcggtatcgttgccaatcgttgggtgaaagaccagcatgcgtacatcgtgcgggtaggcgaaagcatttataaaatttcctggaccgaaccaaccggcaccgacgtcagcctgatcgttaacctgggcgacaaactgttccacggcaccatattcttcccccgctggatcatgaataacccggaaaaaaccgtctgcttccagaacgatcatattccgttaatgaacgcttatcgtgacgccggcccggcctacccgaccgaagtgattgatgaattcgcgactatcacttttgttcgtgattgtggcccggataataacgatgttattaattgcccggctaatgaattacccgcagattttcctgcaaacttgtaatacagcagaaataattctgtgatctaacgctaatttttccgctagattaaaacgtaaaaaaatatttattacgggatggttgacgattcgtttactttcacccgttaagccccagttttctctatgaaactggggcttcttgctgttatctcctgctataattaattatatctatatgattttcatgtatatattactattctcgcgaaaaatattaatttcttaatattatcctaagcaacagcgactagatttaaaaccgtcgaaataccctggaatgaaatgtggcggtgaaccgacttcattttcattttgtttaagtctgctggcgcaggatatttctttctaccggccccttttttagtgggctattaatagaacaggaaaaagatgagcgaatttctgccgttttcgcgcccgtcgatgggcgacgcagagctggctgcgctgcgtgaagttttgcaatcaggatggatcactaccggtcctaaaaaccaggcgctggaagaggcgttttgccaactgaccggcaaccgccacgccatcgccgtcagctccgctaccggcggtatgcacgttacgctaatggcgatgggtattggccctggcgacgaagtgatcaccccttcgcaaacctgggtgtcgacgctgaatatgatctgtctgttgggcgctacgccggtgatgatcgatgtcgaccacgacaatttgatgattacccctgaggcggtggaagcagcgatcacttcgcggacgaaagcaattatacccgtccactacgcgggcgcgcctgcggatatcgatgcgatccgcgccgttggcgagcgccacggtattccggttatcgaagatgccgcgcatgccgcgggaacgcactataaaggccgccacgtcggctggcgcggcaccgcgattttctcgttccacgcgatcaaaaatatgacctgcgctgaagggggcttatcgtcaccgatgatgacgagttggcttcccgcatccgtagcctcaaattccacggcctgggcgttgacgcctacgaccgtcagacccacggccgtgcgccgcaggcggaagtgattactcccggcttcaaatacaatctggccgatatcaacgccgcgctggcgctggtgcaactggataagctggcgcaggcgaatcaacgtcgcgctgaaatcgcccaacgctacctgcgcgagctggcggatacccctttaagccgctgaccattccggcatgggagcaccagcacgcctggcacctgtttattatccgcgttgatgaagcggcctgcggcatcagccgcgatgccctgatggaaaaactcaaagccatggggatcggcaccggtctgcacttccgtgcggcccatacgcaaaagtattaccgcgagcgttttcccgaagtttcgttaccgaataccgaatggaacagcgcgcgcatttgttccatcccgctgttcccggatatgaccgacgacgatgtcacccgcgtcattaccgcgctgcatcagttgtcaggacgttgatatgcttacttatcctcccgtaaaaaaagtctcggtggtgatcccggtttataacgaacaggatagtctgccggagctgctgcgtcggaccgacgccgcctgtgcgacgctaggacgccaatatgaaattctgctgatcgacgacggcagcagcgacgattccgcgcgaatgctgaccgaggccgccgaagccgaaggcagccacgtggtggcggtgctgttgaaccgtaactacggccagcactcggcgattatggccggtttcagccatgtcaccggcgatctgatcatcaccctcgatgccgacctgcaaaacccgccggaagagatcccgcggctggtggaaaaagccgatgaaggctacgacgtggtcggtaccgtacgtcagaaccggcaggacagcatcttccgtaaatctgcctcgaagatgattaaccgcctgatccagcgtaccaccggtaaggcaatgggcgattacggctgcatgctgcgcgcctatcgccgccatatcatcgacgccatgctcaactgccatgagcgcagtacctttatcccgatcctggcgaataccttcgcccgccgggcggtcgagatcccggtgatgcacgccgagcgcgaattcggcgactccaaatacagcttcatgcgtctgattaacctgatgtatgacctggtgacctgtctgaccaccaccccgctgcgtttactcagtattttcggcagcgtgatagccctgttgggctttgccttcggcctgctgctggtggtgctgcgtctggccttcggtccgcaatgggcggcggaaggggtgtttatgctcttcgccgtactgttcatgttcatcggcgcccagtttgtcggtatgggcctgctcggggagtacatcggccgcatttataacgatgttcgcgcccgccccgttactttattcaacgtgttgttcgccagccggaaacggcgtctcaagaggaagatcgttcatgaaagcagtagtcttcgcttatcacgatatgggttgcgcaggtattcagtcactgctggatgccggttatcacatcgccgctatttttacccatccggataaccctggcgaaaaccaattctttggttccgttgcccgtattgccgccgagcaaggtatcccggtatgggcgccggaagatgttaaccatccgctgtggattgaacgtattcgcgagatgaagccggatgtgctgttctcgttctattaccgtaacctgctgtgcgatgagatcctgaatatcgcgccaaagggcgctttcaacctgcatggttctctgctgccgaaataccgcggccgcgcgccgctgaactgggtactggtcaacggcgaaagcgaaaccggcgtgaccctgcaccggatggttaaccgcgccgacgcgggcgatatcgtcgctcaacaagctgtggctatcggcccggatgacgcggcgctggcgctgcaccgtaaactgtgcgccgccgcctccgatctgctgggccgggcgctgccggctattcgtgagggtaagactgaagaacgcgtgcaggaccacagccaggcgacctacgttggccgtcgtactccggaagatgggcgtctcgattgggaaaaaccagcgcgaaccctgcacaacctggtgcgtgcggtgtccgatccgtggcctggcgccttcgcctatgccggcgcgaataaatttatcgtctggaaatcccgcgtgcgcgccgatctgccggcggcgaagcccggtaccgttatctccgtcgcgccgctagtggttgcctgtcagcagggggcgctggaaatcgtcaccggccagaccgaacgcggcgtttacatgcagggcgcccagctggcgcaggcgctggggctggtgaccagcgcggtgctgagcagcaaaccggtggtggcggtgaagcgccgtacccgcgtgctgatcctcggcgttaacggctttatcggtaaccatctgaccgagcgcctgttgcaggacgacaactatgagatttacggcctggatatcggctccgacgccatcagccgcttccttgactgtccgcgtttccacttcgtagaaggcgatatcagcattcactccgagtggatcgaataccacattaagaaatgcgacgtggtactgccgctggtcgctatcgcgacgcctatcgaatacacccgtaacccgctgcgcgtgttcgaactggatttcgaagagaacctgaagatcatccgtgactgcgtgaaatacaataagcgcatcattttcccgtcgacctcggaagtgtacggcatgtgcaccgacaaaaacttcgacgaagatacctccaatctggtggtcgggccgatcaacaaacagcgttggatctactcggtttcgaaacagctactggaccgcgtgatctgggcttatggcgataagaacggcctcaagttcaccctgttccgtccgttcaactggatgggaccacgtctggataaccttaatgccgcgcgtatcggtagctcccgcgccatcactcagctgatcctcaacctggtggaaggttcgccgattaagcttatcgaaggcggcaagcagaagcgctgcttcaccgatatcagcgacggtatcgaagcgttgttccgcatcattgagaacaaagacggtcgctgcgatggtcagatcatcaacattggtaacccggaaaacgaagcgagcatcaaagagctggcggaaatgctgctcacctgcttcgagcgtcatccgctgcgcgatcgcttcccgccgttcgctggcttccgcgaagtggaaagcagcgattactacggtaaaggctaccaggacgttgagcatcgtaagccgagcattcgcaacgcgaaacgttgcctgaactgggaaccgaccgtcgagatggaagagaccgttgagcacactctggacttcttcctgcgcaccgttgagctcacggacgataaaaactcatgaaacaagtcggcttacgcatagatgtcgatacctttcgcgggacgcgtgatggcgtaccgcggctgctggccctgctgggcaagcacgggattcaggcaagcttctttttcagcgtcgggccggacaatatggggcgccatttatggcgcctggtaaaacctaagtttctgtggaaaatgctgcgttctaacgcggcgtcgctgtacggctgggatattttgctggccggtaccgcgtggccgggacgcaggattggcgcgggtaatgaagaggttattcgcgccgccgcacaactccatgaagtggggctgcacgcctgggaccactacagctggcaggcatggagcggcgtctggccgcaggaacgtctgacgctggaaattgaacgcggtctgctcgaactggaacgcattattggccgcccggtgacctgctcagccgtcgccggctggcgtgccgaccagcgggtggtaaaagcgaaagaatccttcgatttcctctacaacagcgattgtcgcggcacgcggccattcctgccgcagattggcggcggggcctccggcaccgtacaaattccggtgacgcttcccacctgggatgaagtggtcggtagcgctgtggatatcgccggctttaaccgctatctgctggactgcatccatcgtgacaaaggtacgcctgtctataccatccacgccgaagtggaaggcattgcctgtgccgaccagttcgatgcgttgctgaccatggcggaggaagaagaaatacaattttgcccactgagccagctgctgcccgctgactttagcgagctgccgtcaggcaaagtggtccgtggtgaactggctggccgggaaggttggcttggatgtgaacaattactgggctcgggtgtatgaaaagcattcgttatggcatctctctggttgtactctttgcgctgtattacttattgccgctgaatttccgtttgctgtggcagcctgatgaaacccgctatgccgagatcagtcgtgaaatgctggcctccggtgactgggtggtaccgcatctgctgggcctgcgttactttgaaaagccgattgccggttactggattaacagtattggccagtggctattcggccataataactttggtgtgcgtttcggttcggtcttcgccattaccgtcagcgcgctgctggtggcgtggctggcgtggcgtattttccgtgataaacgcgtggcgatcctatcgccggttatcttcctgaccgcgatgctggtctacgcgataggcacctatgcggtgctggatccgatgatcaccatgtggctggcgctggcgatgtgcagcttctggggagcctcacaggcgcagagccgcagcgggaagatattgggttatgtcctgctgggagtcgcctgcggtatgggggtgatgacgaagggcttcctggcgctggcggtaccggttgttggcgtgctgccgtgggtgatggcgcgtaaacgctggcgcgaagtgctgacctacggctggctggcggttgcggtctgtacgttggtggtgctgccgtggggattggctatcgccaatcgcgaacccgatttctggcgctatttcttctgggtcgagcatattcagcgtttcgctgaaaaagatgcacagcataaagcgccgttctggtactacattcccttcgtgatagccggcagtctaccgtggttggcgctgttaccgggggcgctgaagcgcggctggagcgaacgcgatgatgcccgtggcgcgctgtatctgttaggctgggtggcgatgccgttcctgttcttcagcatcgccaagggaaaactgccgacctatattctgccgtgctttatgccgctgtcgattttgatggcccgctacgcgctggatgctgcgaaggcaggggcgaaagcgctacgcatcaacggcatgatcaacctcggttttggtctgatcggcctggtcgccgtgctggtggtctcgccgtggggcgtgatgcataaaccggtgtggacgaagatagagttgtataaatgtctgctggcggcgatcgcgtttgccgtatgggcgctgatgggctggctggcgataaaagacaacggtcgtcgctggactctggccgccatctgtccgctgggactggcgctgctggtgggcttcgctatcccggatcgagttatcgacagcaaacagccgcagtttctggtggatattgttagcgaatcgctggcgccaagccgctatgtactgaccaacagcgtcggtatcggcgcggggctggcgtgggagctcaagcgtgacgacatcattctgtatgaaaggcaggggagctgaaatatggcctcgactggccggatgcgcagagcaaattcgtggcgactcaagcttttgctgattggctggcggcgcaccgccagcaagggccgatctcactggtgctgctgatggataaaggcgaaacgatgaacgaactggcgttaccgaaacctgataactcctacgcgctggggcgcgtggtgtttattcagtatctgccacaatgagtgtctggttctgtctgatactcgccagcctgcttagctgcgtcggccagttgtgccagaagcaggcgacccggccgtcccgtagcggacggcgcgggcggcatattttgctgtggctggggttagccctgttggcgctcggcggtggtatgctgctgtggctgggggtactgcaggcgatccctgtcggtatcgcttatccgatgctgagcctcaattttgtctggataacgctggcggcatggggcatctggcgcgagccggtggcgcgccgccactggcttggcgtcgggctgatcgtcgtcggcatcgccgttctggggagtagcgtctgatggggttaatctgggcgttattgagcgtcgggctggtcagcggcgcgcagctgttactacgcagcgcgatggtcgagctgccgccattgaccgatatcctggtcttcctcaatcatctactgcatttgcgcaccggtactttcagcctgggtttcggcctgttcggctatctgctgtcgatggtctgctggtatttcgcgctacatcgtttgccgttggcaaaagcctacgcgctgctcagcctgagctacattctggtgtgggccgccgccatctggctgcccggctggcacgagccgttttactggcaatcgctgctgggcgtgctgattattatcgccggcgtgctgactatcttctggccggtcaagccgcgccgttgaagcattgaatgtgcgccgccgtcagcgagaacggcgttggcgtacagaccgcaatacttaacccttcatactgaatctggcttaatgacagggcgccgcgaaaggcgctgtcaacagaggccatctgccaggcgctgccgccgcgttgctttaccagcgtttctttgcgcgtccagattcgccagaaggcggctagctgccgctccggcggttcgcgctccagttcctggtgttcgccctcgctaaacagggcgttggccaaccgctgccagcctttgcgcggacgaatcacttcaatgtcgcagccaacttcgccttcatcgctcagcagcagggcaatatggtcgccgctgtggctaaggttaaaccaccgaccgcagccgggcgggaaagccggtttgccctgctcgccatacgcaatatccgccagcggggccgccacatgcgtcagcagcgcgcgcccggcaagccagctggcccgccgtgggccggcaggggcctgagccgctagcccactcggtaacggtagggcgctaagcgttgagatttggccaaggataagctgatacatttcaggaccagcgctgaataatcattgaggtattgataccgccgaaggcgaagttgttgctctgcaggaattcacaatcaatctggcgcgcttcgcccatgatgtaatccagttctccgcaattggcatccggattatgcaaattcagcgttggcgcgaaccagccctcgcgcatcatctgcagactcatccacgcttccagcgccccgcaggcgccaagggtatggccaaaatagcttttcagcgaggagatcggcacgctatcgccgtaaatcgccgctgtcgcctggctttcggcgatatcgccgcggtcggtcgcggtgccgtgggccgaaatgtagccgatatcctgggcgctcaggcccgctatttttaatgatttttccatgcagacctgcatggtttcacgctgcggttgagtgatatgcgcagcatcgcagttggtggcgaagccgataatttcgccgtaaatggtcgccccgcgtgctttggcgtgctccagctcttccagaatgagagttccggccccttcgccaatcaccagcccatcgcgcagcacatcaaaggggagggggtaatgtcgggctgctcattgcgctggctggtggcaaacagagtatcgaataccgcggcctccgacgggcaaagctcttccgcgcctccggcgatcatcaccgtttgatagccgtgacgaatcgcttcccaggcataaccgatcgcctggcttccggaggtacaggcgctggacgtcgggatcacgcggccgcgcaggccaaaaaacaggcctgtattgacggcggtggtatgcggcatcatctgcacgtaggtggtagcagtaatattgttggtgtgcttttccgtcaacatggtggcgaattcgctcatcggggcggtactgccggtcgatgaaccgtaggcgatgccggtttcgccgttactcagtatggcatcgtcgataagcccggcctgctccagcgccagttcagtggcgcgggtggaaagtaacgatacgcgccccatcgcacgaatgcgcttgcgggtatagtggtcgggcagggtgaaatcatcgataggcgcacccagcagcgtatgcagcccgtcgtaaatacgccactccggcatggcgcgtacggcgtttttatatctcttcagccccgccgagacatcctgccagttttcgccaaatgcggtgacgccgcccatcccggtaatgaccacacggcgtgtcataacatcccccattgatagaaatgacctgccgggtgacataacccgccacatccgacattaaataactcgccagccccgccacctcttccgcctgtcccatgcgtttcatcgggatcatcgacatcgcctctttcaacgcggcctcttccatttcgatcatcccggtgtcgataagcccgggggcgatgcagttcacggtgattttgcgcttcgctagttcaatcgccagcgctttggtggcgccgatgatacccgccttggcggcgctatagttgacctgaccgcggttgcccatcacgccggaaacggaagagagtgtgatgatgcgcccgccctggcgtgcgctaatcatcggcatgatgcacggatgaatgacgttgtaaaagctgtcgaggttggtatggatcaccgcgtcccagtcgttttcgccgagcgccgggaaggcgccgtcgcgggcgatgccggcgttgctgacaatgccgtaccacgcgccgtgttcggccatatcctgctcaaggacttcgcgacactgcgtgcgattgccgacgtcaaagctcagcagacgccccgcgccgccgccggcggtaatcgcctccagcgtctgctgcgcgcctgacgcgtcgcgatgatagtggacgcctaccataaaaccgtccgccgccagctggcaggcgatagcgcgaccgatacctttgctggcgccggtaaccaaaactgaacgactcattctgacgctccttgttgaaatagggtgttaagttctgttggcgttggctggaaggtattaacccttccgctggccagcaggtcatcgtccgccatcacggcgccttcgaagctagcgaaacgctcgtcctgcatgagcaacttaacggtaatggacagagccttgccgcgcgggagggagcctgccgcacaaactaattcgcgcgcgccaagaaccatacctaatgagatggacgcttgccctttttgcaggcggtgccagccggaccagacgccgacggtttgcgccattaattcaagggcgaaccaaccggggagattgccctctgcgtcgagaaatggcgccaggacgctatggggcgaaaccgtgacccggcaggtcgcggtttcgtcggtcacattgacgacctcttccagcagcagcatcggcgcatcgtgcggtagatagtcgccgggcgataaatagtggttcattgaatgctcccgagcaggatgctggcgttattaccgccaaaggcaaaagagttcgacaggataatcggtcgcggcagcggctggggatgttcgatgatcccgcatggcggaagggtggagtcgcgcggcgaccggctgaaatcctgcgctggcagcggcaggtttcgctgcagaatcagcatgccgatggcggcttcggtgatccccgcggcgcccagcgtgtgtccggtcaggtgtttcgttgaactacagggtacccgaacgccaaatagcgcgttgatgacgtgagactctattctatcgttaagcggcgtggcggtgccgtgcaggttgatataacccacttgttcaggggcgatgcccgcatcccccagcgcctgctggatggcgcggagcgccccctctccttcaggatgcggggcggaaatatgccaggcgtcgctggactcgccgatacccagtagcgcgactggctgcggttcgcgggtcaacagcatcagcgcagctccttcgccgatagtgataccgttacggtcgcgggcaaacggctggcactgcgtcgtggagagcgattccagactgtgaaagccgttgatcggcattcggctgagggtgtccgcgccgccgacgatcgccacatccgccagcccggcttcaattagtcggcgtccgctgataatcgctctggcgctggaggagcaggcggttgacagcgtaaatgccgggccatccagcgccagccagtggctgagaaaacgcgatgggtcgcccagctcctgttgcggatattgccaggccgcgctttccttgccgccaagcgtcagggtgacatgcgcgtccccctcatccagccccgaggtgctggtgccgagcaccacggccacgcgctcccgcccgtattgggcgatggagtcatccacctgcggttgaatttgcgccagcgctgccagcagcagctgattattgcgcgagcgatgggcgctaaaggtatcgggaatggcgggcaattcgccgtccacacccgcgaacaccgcctgcggatgcccctgtagccacccgcgcgcggacgcatgccgggcgcaataccgcgagccaaattggcggcgatttcatcgttatcgcggcccagcgcgttaatcatgccgacggcggaaatgtagatcatctcagtcacccaggtattgaatggtgatgtggtatttaaagacgtgttgttcgatgctgatcggcacgcgcttgcctttgcggttgatataggtgatttccgtgaccagcttcccacgcgcgttacgtagttcgcgtttgtcgccgcgctcggtcaacgtccacccttttggcaactgcggcagccatgcgctaaccggccagtggctgagcatcacatcggccagcacctggctggctggcggcagttgcggaaccgccatcgactgttcagcgcgcagccctctttcatcataggtcaccaggaacaggcggataccgacggacgacagacccgccagcgtgatctttttatcatcggcattgagcataaccagcagcgactgggtttggccgttgaagctgccggtgagcaactgctgcgagctgatgtccggcgaaatgccaggtggcggcaacatgacgcgcgtacccggttccagccacgcctgcgggcggccttgcgacgccggctgcgaatgactgcagccggccagcaataaggcggcgagtagcgcgaaggcgcgccagaatgatggtcttctcatcgtctttttttctcttttttggtcggcatcgctaacggcgaaagcaggaaggcggtgaaaatgccgcttaccaaaacaataccaaaactgctaatggcctgcgtggcactaaacaccagcatgccgagcgtcaataaggtggtcatcatcgccagggtgaccgccagcagcgatgtcagcggcgtaccacgcgggttgctgaaaaatagcgtgtagttaatgccgatgcccagtaccagcaccagcgccagcaaggagaacaggttaaccgcgtggccgctaaatgccagcaccgccagcccgcatcccagcgacaataccgacggcatcaggcttatcagccctttgcgccagccaaggcggagcatagcgccgcaggcaatcaccgccagcgcaacgcccagcaggccggttagaatgtggcggtagagcgcgaacagctggtcgaaatcacttttgcgatcgacccacgcaacgccagcctgttttgtgctgagcgccttcagcgccgcgctgtctttcacgccgctcaccgggaccagtacgccgctttcgccatccggcagcgtaagccatagaagccgccatccttcgctggcggggctggcaagccaggcgtcgacggtcactggcatcgggttgagatcgggattgatcgttgccagcccggcgtggttcagcacgttactgacggtgggcgcggcgcgttgcagcagggcaagatcctgctgctggcgagcgagtgaattcaagggtatagcgcgatatccgccgagcaggccgtcgctttgcgcctgcgtcagcgcgggcataaatgcctccaggcgctgcagcgtctgctgggccgttttgccgtaaataacaaaccacttttgatcgacgctctgcccggtgagcgcggtgatggctttttcctgggccaggatatcctgcggcaacgcctggagctgcgaaatatcatcatccacccgcagcgtcgcgagacccgccagcgagaacagggccagcgcgacggggaggccgatggacagctttttatggcgtcgccaggcggcaagccagcgtaacaacaatgccatcgccggaaccgggcgcacgggaagtccacggcacaaccatggatgccagaaaattaccgtcaggcacgaggcgctcaggccgaccgccgcgaagagcgccatctggcgaatcgccggaaagggggccagcatcataatcagataagccgccacggtagtaagtagcgccagcagcaacgcatgacgcactttggcgaggctttgccacggggttgattgcgcgccatgcaccatccgttcggtcagataatagagcgtatagtcggcggagatgccgatgatgctcatgctcatcaccagggtcatcagatgcagctcgccaaatagcagcagcgtgacgacggtgccggccagcgcgccgatagcaatggagagcaggcacagcagcagcgggcgcagcgaacgaaatgtcgcgacgatcagcaggatcacgccgaacagcgtcgccgcgccgagtgtagaaatatcgtgcttcgcctgctgactggcgtaatcgctatagaacacggtgccgcgcgacagcagctgcgcctgcggatgctgcgttttccactgtttctccagctcgccgagcgtagtgaccagccggtgcgtctgctgcatatcgaatgaggaacccgccagttcgccatgcaacagataccagaggttgccctgggcgtctttggtcaccagccagccatcctgcagttgcatccgctggccgcctttcgccatcgccagctgcgagccgcgcatcagcatcagcggatcgttttgcagttctttaccgctgacgccggaaaatgccgaatagagctgtgagaggatccattgcgcctgcgcctcgccgccgttttgcaggcgcgcgcgggtagcggggtcaattaaaccgttacgatgctgccagaaaaatgtcccccaggcctgctgattatcggcattcattgggcctttgacgtctgccagcgccttcgatgtttgcagcagacgcagccagtcgccggccacctgcgggtcggcctgtttaccggggctgaccagccacaccagctggcggtcaaggcgctgcataaaaccgtcgttcaggctgggcgggattgcgccaagcgtctgcttcggcagcatcgccagtacgctgctgttgagccgggcctgcggcagcagcgccagcagcgcgcccgccaggagcaggcagacgacggcccataacagcgcggggcgtttactgggcggcaaagcgttggcgttcgtcatcggtcagttgcgcaggcgtcaattggtgttgggaaagggtgatatcggtgcgatcgccttgcttgtcgttgagttgaatatgttccagatagtcttttccggccaaatcgatgcgggcaaaaatcttatccagcggcgtagtgatgggcgtcaggcgcagcgtccaatggccttcgcctttatcggcaaattccacgcggaagttctcttccagtacttttctatccgcctggaacagcgcacgcagcaaatggttgaactgaaacatttgcgggttgttttcggcagtaatggtctgcggcggctggccgttgatcgcctgcaccatccgtttgtcatccagcaacagctgcatcgggaacggcgaggtttgatcccacagcaaccccttatcgcgggcgatcaacatctgcccctgggatcgcagcggctgcggcagatcctttatggtgcgggtttgatcgaagtgggcgcgcaccaccggctgttcgctaaattgtttttgcaggtcatcaagcgtcagggcgctgaccagcgggctgataaacagccctaacagcagcagtaatctcatggcgtaacccccatgcgttcaaacagaatatccgggctgacgaaacacatctcgcggctgttttcatccaccgcaacctggatggtgtagccggtggtggtgcgcttgccgctatcgacatcaaaaatttcgtagccaatgcgtaggcggttctcaaactcttctatccgcgcgcgcacgcgaatgcgctgctcgaaggtgataacgtcgcggtatttcacgcgggtatcgaccaccggccacaaatagcctgaggctttcatctgccggtagccgtagttgaactggttaagcagcgcctcacgggcaatttcgaagtagcggaaatagttgccatgccacacgacgcccatcatatcgatgtcatgaaacggaatagtcagctctacttcagcagtaaaacggggatcgttaagcaccctttactccttgtctttgggatccggcaaacgccagaaatcgaaaaagttaaaccagtcgagcggcgactgcagcgcgtagtgttccaaccgttcggcgtagcggtcgatgttgtgttgcaatgcctgttggcgatcggcgcgcggtaatagcagcgggttggcgaacggctcgcagtaaatgcgcagtttgccctgctggcggagagcgaaaagcaaattaaccgggcagcgcaaaatggcagctaggataaatggccctgcgggaaggggcggtttgccccataaaacggctccagcagatgcgccattcgccgccgcgctgcgggttaaccgcaatacggtcgccgacaatcgcgatccactcgccgcgatccaacttttcttgcaacaggatggcggtttccgggccgatatcgttcaccggtatcaggttgagcccggcctgaggggccatttccgtcataatttgtttaaaacgttgcgcgttttcgctgaacaccagagcgttgatagttttgctgccctgcagttgcgccagcgcgcggcaggcttcgacatcgccgagatgcgaaaccaacagcagcttcccccgcggatcgctgatattcagcgcctcctcggcgcctgcggcaaagaccacatcgtgaccaaactgtagctcaccgcgccagctggcgattttatccagcatcgcctcgccgaagcgcaggaagtgccgatagctggtcagggttggcggtaacggcatctggcgcgcggcgagctgttcgcgcacgcgggttatccattgttgcgaagcgcgacgggccgtcgcggccgtcagccagtacacgccgaccaccggataaagcagcagcgagaacgccttgcgccccagcagccgccacaccagcagcatcaggcgcattccccataatccttttacctcccgctgacgcgcccagtgcggcgaggcgcggcgaaacagcagagaggggatccgcggcagcatgccgaggaacagacgcgtgtgcatcagcgagatgcggcagttatctttgatggcatcaaaatgcgacaaaccgtccggcgggtaggtcacgcgggttggcacaaaatagctggtatttccctgccagtagaggcgcaccatcacttcggtatcaaaatccattcgctggccgagcgacacgcgctgcgccagctgtagcgttggcgccaccggatagacgcgaaaaccgcacatgctgtctttcaactgcagagacagcgtttcaatccatacccagacgtgggttatccagcgcccgtagaggcgcgaacgcgggatggagtcgtcgtaaatcggctgcccggaaatcagcgcttcgggatgggcctgcgccagcgccaacagttgcggaatatcttcgatggcgtgctgaccatcggcatcgacctgcaccgcgtggctgaacccggcttgcgctgcggcctgtagaccacggatcaccgccgcgcctttgcccgcgttctgtggtaagcggattaagtttagattagcggtttccgccgccagccgctccaactgctgccgcgtactgctatcgctgccgtcgtccactacgatgcaaggcaggccaaagggctgcaggcgcgcgagcacccgcggcatcatggcaccgtggttatagcaggggattagcacgcagggagagaaatctagcggcataagcgaattttcccgctgctggcggtgtgccgggtttcaccgtcatggcgctgatagctaaaggtcatggtctggcgcgcctcctgccatgtcagggtgagcgtgacgatctcgcccggcagcagcggcgattgaaatttcacgttctgaatgtcatgaaagcgccagccgggcgcgagcaggcgggtggcgtaatgcatcgcccaatcgatctgtgcgacgccgggtagcagcggttgcacggcaaaatgaccgcgaaaccagaatagcgccgggtcgagagagagcacgatttcaactcgatcggcttgcggctgacggcgctcaatttcatggggcttcatgaaataactcctgtaattgcgcgtagacacgcttattcatgctgttaacggggatctcgtcaaccacccgccagtagcgagggatggccacaggttccagcgaggcgcgcagcgctttccgccattgtaattcctggcttttcccccatcggcgacgggcgtcatggtcgagcactaacaacgcgccaacgctctggcggctgccgcgggtaatcggcagcacggcggcctcaagaatgccatccagttgcagtaaacggtattccacttcgcttagtgaaatgcgcttctcttcaattttcactacccggtcccgacgcccgcaaagatggaaccgatcgctatcgctaaaatgtagaatatcatcgagtaacagaccgcgactgtcggcgatcagtggggaaaagaggcgaaacgcgtcgccttctggttgaaagctgatgcctgggaacggctgccacggcgcattatcttgcaggcgctggcggcaggcgataaccccgctttccgtgctgccgtagatttcatccggccagcaattaaaccagcttgcggtgtgcacggcatcctgccagggcagcttgccgccggcggacaaaatcatcgcgaccggcggcggggtaagccgatagtcgagacgtttgagaaaagccgggctactgataaataaataatgatggtcatggcttaatgccgccagctgctcggcgtactcaatcatcgccgcgtgcagcggcaaccccagcgccattggcaggaacagacggaacgtcaggccgtacaagtgctgcggcgccaccgatgccactacccgactgcctgccaggcgcccggcatagtgcgcggctatcagcgccgcctcgcggtcgagactcttgacgggcttactaattcgctttggttcaccggtagaaccggaggtaaaaagctcaatgcaggcgttatcgccgatcgccgggaacgcgtattcgtgggatgcggtcgccatggcggactggataacccgcagcggcccgcgccatggcagcgtcttatcgctcaggatgccgtcgaaaagcgctcgctgttcgtgtaatagcgacactcggctatggccagggaacactggcgttttccccgcatgcagcgtggccaacagcgcgaccataaacaggtagctgttgtcaaaacagagcgcccaacgctcgcctggctgctgttgcaggttattaagcagatgagcgacgtcatagcgcagatgcgccagcgtccagctgtgttcttcctgccacgcaatcagcgtttgcggcgggcgcggggcgctgagccactgggccaatgtgaggggctgcatcatggtttatctcgtttaatcacccgctggcgcaccagccactctccggccatcaacatgcccatcagcagataggaaatcatgccgttccacgccgtccatagcgacatatcgccatataacgcggtaaccagcgcaatgccaccgttgaggatgaaaaaggcgcaccagatttgggtgacccggcgggtgtatcgcacggcgcgctcaggaagaaccggttcccgcaaacgcgccaggcgctcgattacaggcatacttgaccacagcgaaccgccaaaaaccgccagcatcacgccgctcaccactaccgggtaaaatagcagtagctgatggacctttaacaggtagctggcaatgcacagcgccatgccggctaccgcaacgatctgagtgaccgcactcaacggacctgactgtcgccgggtctggcgaaagcgtaaaaacagcagtagcgccatcagcggcaacagccattgcaggctgttatgcgcgaggccaaaccagatcaaaaatggccaggccagcagtaataaccctgtcattaatgaaacgaccggcagcgagcggatgcccgacacggtgaattacgcttctttcagcaggcgatccgccgcatcgaccacatcctgaacggtgcgtacggttttaaagtcttctggcttgattttcttgccgattttcttttgtagatggacgatcatgtcgatggcgtcgatgctgtccagttcgaggtcttcgtacaggcgggcttctggtttaatatcctgcggatcgatttcaaacaccttcaccagcagcgcggagacttcttcgtaaatagctttttgttcggtcatgacggctctcctcaggcacgctgcgcttgaataaacgatgccagtgtggcgacagagaagaagtgctggcgcatctcttcgctttctgccgacagcaccacgccatactgatttttcaccgccaggcccagctccagcgcatcgatggagtcaagacccaggccatcgccaaacagcgcggcgtcggtgtcaatatcatcaggggacaattcgtccaggttcaatgtactgattatcagattcttaatttcaagatagagcgcttgcatcattaattcctgtttcaggggcaatgcctgattctaatttaagcaaaatatgccggtttaactgccgtgcggccagcgccggttcttgtatatttgcatcataaaattggtctattcgtagccgttctccgacttcgacggtaaataacggcttcgttcgcggcgcgtcgtaccatttgctctgtttgcccagcatatgctcggtacagcggatgacgacgacgcgcaaatcgctgccgcagcgcacggcgatattggccgcgccgcgctgcagctgcattttttctcccggcaccgttcgggttccttccgggaaaatcaaaatagtatcgccctgctgtaagcgctgccgactggccggaagcagggtctcggcacgatcgttaatcaaataatccgccgcgcggatcacgccgctgacaaatgggtttttcagcaacgcgcttttcaccaggcagtcggtttccggcatcaccgaggccagcatcacgtagtcgatgaggctgggatgattggcgaccaccaggcaaccgcgttcctgacgtaaaatctcgcgccctttaatctggtagtccagtacgccgacggctttcactacgttaagaaaaacgcggaagctggcggaaatgctgcgccgcgcgagacgacgacggcgggtgttatcgcgcaccacgatcagcaacagattgaaccagatcagtgacagcaacagtccgccaaggccgaacagcgcgaaacaaaaaccggtcattgccgcgcgccagagccggttaaaccgccagcgaaggttgttcatgagcggctccattgccattgcacgcgttcaccgggcaaggtgaacctgctctcattctgcaaatagtgctgtaaaaactgcaggctttgcggcagcgtgctctcttcgccagcatcatggcgttgtgcggcgcaccgccattggtttcccgcttcaatcacccatgccacggcgtagggccaggttggcatcgtcgatggtagatgggagtgataaaactccggcagaaaaccatcaaaatcaaccatcaagacgcgttgataacctgcctgcagaagccccatgacttcatataatccctgctggaaagtgtcgcgcccggcagaaagcgatgacgacgcaataggctttttcgccgcaatcgtcagattaccgacggcggaattatgtaccgataaggcgaaatcggtaggcgataccgcttgctccatcgccagggcgtggaggatccgatagttgcgctctagctcgccgtgacggctggtatagagaacggcctcgatctcatggcggcgaagcatcgccagcccgcattcaaccgccagcttgctgccggagctaagtcggcgggcggtcatcattggcagttcgctaagcctggactgcggcgcggccggatcgatggcgtgcaaatgccgtgaccatcgtagccactgctcggcttcgcaaagcccaggggctctggcctgccagtcgataatgttcagggttaaattcatctacgcgcgtccgcggtaagcctgtagttctatgatcgcgacgtttatagaacccgaaacccggcgataaccatcacgaagccgttaattgggggctttgcaaccgaaaatcagcctcgccagctaagggtgacgccaagcatatccgcagcgcagaaaactttgcgatgagataatgctgtattttcggtattttcgccgcttagtgcaatttattgcgttaatctccccataaaggatgatatttcccctgaatagatggcgccaatagcgggaactgcaattaccgaccggacatggtaaatagtagatatctgttgccaatatttggtggaacctgatgcccgaacccgtcgacgaaccggtgcttaatggactgcgcctcaatctgcggattgtctccgtcgttattttcaactttgccagctatctcactatcgggctgccgttggcggttctgcccggctacgttcacgatgtgatgggttttagcgctttctgggccgggctggtgattagtctgcagtatttcgccacgctgttgagccgaccgcacgccgggcgctacgccgatctgctaggaccgaaaaagattgtcgttttcggcctgtgcggctgtttcttgagtggtttgagctacctgctggcagcctggggcagcagttggccgctgctgagtctgctgctgttatgccttgggcgagcgatcctcggcattggccagagcttcgccggcacggggtcgacgctatgggggtaggcgttgtcggctcgctgcatattgggcgggtgatttcgtggaatggcattgtgacctacggcgcgatggcgatgggcgcgccgctgggcgtgctgtgctattcatatattggcctcagcggcctggcgatggtcattatggctgttgctctggtggctatcatttgcgcgctgccgcgaacggcggtgaaggcgacgaaagggaaagcgatgtcatttcgcgcggtgctgggccgggtttggccctatggcatggcgctggcgctggcttctgccggcttcggggttatcgcgacctttattaccctgctttatgacgcgaaaggctgggacggcgcggcctttgcgttaacgctgttcagctgcgcgtttgtcggcacgcggctgctttttcccaacggcattaaccgcctcggcggcctgaacgtggcgatgctctgttttagcgtggagattattggcctgctgttggtgggctttgcacagacgccgctgacggcgaaagtcgggactttcctcaccggcggcggtttctctctggtcttcccggcgctgggggtggtggcggtaaaagccgtgccgcagcacaatcagggggcggcgctggcgacctataccgtatttatggatttgtcgttggggataaccgggccgctggccgggcttttgatggcgtggaccgggataccgacgatttatctggcggcggcagggctggtgatggccgcgctactgctgggctggcggttaaaaaaacggccccggtggttgaaccggaggccgctgcatcagggcaataaaattagttaatgaccagcgtgttgacgatgctttccgcttcggtctgcgcctgctgctggttgtccgctggcagagtaacctgcagagtcagcaatttgtcatcgatcttaccgagcagcacggaagaccatgcggtctgacccttggcggagatgatgctgtccagttgctgtaaggtgtggcctttaatctcaatcgatttgttagacacaacctgcagctgcgggtcgcggctgcgctgctgatcttccagacgtttggacagcaccgccagatcttcattagtgttgtcgccgacaatcacaatcaccgctttctggccggtggcgtcggaatagacgtgcatattgttagcctgagtaccaagcttaccgctctggtcggccatgcccgcgggcagggtgaagctcagtttaccatccagcaggctaatcgcctgaccgctggtattgctctctgctgccgccccgacggtcggcgcttttgaatcgctgttatcacaggccgcaagccccataaccagcaggccaataccgacatatttaaccaaattgcgcattgacatcttcctttcgataaacggccattaacggctcatccggttatcttatcacaaccgttagcgagtacctttaacctggctgcaatgccgacaaatcagatttatccgccagtcttttcaacagcatattcaacagcacgccgtacatcggcaagaagaagacgatgctgataagcactttaaagcagtagtcgaccgtggcgatttcgccccagtgggcggccataaacggatccgggctgcgccagaaggcgatgaagaagaaggccagggtatcgctgacgttaccgaacagggtcgacgccgtcggcgccagccaccagcgacgattctgacgcaagcggttgaaaacgtggacgtcgagaatttgccccagcgcataagccataaagctggcggcggcgatacgggcgacgaacagattaaaggtgcccagcgcggcaaagccctgccactcgcccatataaaacagcgccgaaatgccataggaaataatcagcgccgggatcatcaccgcgaagatgatgcgtcgcgccagcggggcgccgaaaatgcgcaccgtcagatcggtggcgagaaaaataaagggaaaactgaacgcccccaggtggtatggaaaccaaaaatggagatcggcagttggaccagatagttgctggaggtgatcaccagcagatgaaatagcgaaagccagacgagcgctttcttacgctgtacggtagtaaagggattcatattgtgacctttttatgtccgtcatgcttcataccaatgaaggaatcgggagcggaacgttggggtgagggaacccaattaaaaacggctgcatgatactgcgttgcgagcgtaatgcaatggttgtttttcgcgcaaacgttaacctggcttgcgtactggcgaagtgggggtaaactaaggccgttttgttaaagtgagataaaaatgagcgaacttttttccagtcctgaccatacgctggacgcccttgggctccgctgcccggagccggtgatgatggtgcgtaaaaccgtgcgtaccatgccggtgggtgagaccctgctgattattgccgacgatccggccaccacccgcgatatcccggtttttgcctctttatggagcatgaactggtggcgcaggaaaccgaagccctgccgtaccgctacctgatccgcaaaagccactgaatccgagttattcgggatacccaacgctcagaaccgtagccctgccaagcacagcgcgagcagggaatatcggttcaacattactttttacgcaataaccgcagagcgttagccgttaccagcaccgtcgcgccggtatccgccagcaccgccagccacaacccggtcaggccgaaaagggtcgtgacgaggaaaatccccttcaaccctaaagcgatggcgatattctggcgaatattggcgtgggtggcgcgcgccagcgaaatcatctgcgccaggccggtgaggcggttatgggttagcgccgcgtcggcggtctccagcgctacatcggtgccgctgcccatcgcaataccgatggtagccgctttcatcgccggggcatcgttgataccgtcgccgaccattgccagcggcgcgttggcgttaagcgccatcaccgcattcactttgtccgccggcagcaatccggcgcggaactccaggcccagttcattggcgatagccgccgcagcgcgcgggttatccccggtgaggatcaccccttgtacgcccaattgatgcagctcatccacagcccgacgcgcatcgtcgcgcagggtatcgcgcagcgccagaatgccgagcagcgtatcatcgcgcagcaccagtaccaccgtctgtccggcgctctccagttgctggatctgcgcctcatgctcagcgggggctgccttactggccgcgcagattaagatgcggctgccgttgacctcggcttctatcccggaaccggccagcgcccgctggttgcgcgcaacgggaatcgtcagcttacgttgctgcgcttcgcggactatagcctgtgccagcgggtggctggagccttgttcaaccgctgccgccagcgccagcaggccgttttcatcagcgtcggcggcggcgataacgcgggtgacctgcggttggccgatggtcagggtaccggttttatcgaatgccacctgacgcacctggcccaattgttccagcgccgcgccgcctttaatcagcgccccgcgtcgcgcggcaaccgccagtccggaggtaattgccgccggggtggagatgaccagcgcgcaaggacagccgatcagcaatagcgttaagcctttataaatccacggcagccaggcgctggcgaagaacagcggcggtatgacggcaaccagcagggcgaccaccataatggcaggggtgtagattcggctgaagcggtcgatgaagcgctcaatcggtgcccgtcgctcctcggcttcttcaatcagtttgaggatccggtcaatggcgctgtcgcccggttcggagagaacgctcaattgcaccagtcgatcgacgctggtggcgcctgccgctacgcgctcgccggctttacgttccaccggtaccgattcgccggtcaatgcgctttcgtcaaaactggcaaacggcgatagcagctcgccatcggccggcagacgcccaccggcggcgacttcaatcacgtcaccaggacgcaggtcgcgctgggagacggtctcacgctcgccatcgcgcaggcgaacggcggtatcaggtttgagcgccatcagggcgctcacgccctgacgcgcgcggctggcggcccagccttcaagtcgttcaccgatcagaaacagcagcagcaccatcgccgcttcggcggtggcgccgataaacagcgcgccaatggcggcgacgctcatcagcgtttcgatggcaaaccagctgccgcttttaatcaaccgcagcgcctgacgggcaacaggccacagaccgacgagggtggtggcgacaaacgccagcttgccgaacgggtggttaaactgctccagaccccaactgagcgccatcattaccaccagactcaataacgccaggttttcctgcagccatgaaccttgcggtttctcttccagcggggcgtcagcatcgcgcagggtataacccgcggcgcgtaccgcggtttcaacctgcgaacggatatcgctgtcggcattgaccagcagtttctcggtggcgaatagcacctgtacctggctgaccccgtcgatttggcgcacggcggtttccaccttacgggcgcaggccgcgcagtccatgccgtctacctgccagctatagcgggcgccattgagcggctgctcagcggcggcggtttctccggcgcagttatgatcggtacagcagctttccgcgggcgctgtcgccggggtaaatttgaatgacgagaactgggggacttttttgtcctgagattctggtgtcgacatggcaccctccgggtaatgataattttctcattacccgcaggatacactctggagtcgactccagagtcaagcagtaaattacagatacagtgcgcgaacgatcaggaagtgcccggcaaagtagaaggccgcggaaatggcgttatcggcgcggaagcgacggcgatagtggctaatcagccagacggcgttacccaacagcagcgaagcggcgccaaggaagccggagagcgcggtatcggtcggccgcacgaaccacagttcgcccgccagccacaccatcaccagagtcataccgataaaggtcagcaccggcatgcgcatctcttccagtcgggtccagataattgccagcagcagcgcgccgagcaccagcagtaccagcggcagcggccagaagaacgaaagcgtcatctggctggcgaaccagatcgtatacagcagatgagagaggaagaatgcgccaaccgcgtacatcacccgctggcgcggcagcagggttaacgcatcgccgagcagcgaagcgcacaggcccgccagcaccaggtagctaatggcgttgaacatcggcgcctgccaggctaacagcagcaacagaagcagtgtgaccggtttaaagacccagcgctgccaggccggcccacgataggacgcatcgacgtacagccatgcggagaaacagacagcaataaacgaccaaagcatagtaagtccctgtatctgttatcattaaataagcgattacgcttacggtactggatctcagtgtagtggtttgggccagaagatgacaacgttattcaatgcgcgttatccttattcctgataattcttatgggtacgcaaatgagtaaagttccgctattttttgtgctggtggtcgcggtgattgtggtggcggcctcgtttcgctacgtgcagcagcgccgggagaaaatggataacgacgccgcgccgctgctgcagaagcgggtggtggtcagcaataagcgggaaaaggtgattaacgatcgccgctcgcgccagcagacggtgacgccagccggcagcgagatgcgttatgaagcgagcttccgcccggaaaatggcggtctggaagtggtgttccgccttgatgcgccgcaatatcacgcgctgagcgtcggcgaccggggaatgctgagctataagggctcaaaattcgtcgactttgttgccgataactgagccctggattaatcgttacttcttcttcagcgtggccttcagctttttctgccaggccaccagttcaaatacgccgaagatgaaaatacgaatctgctcaaaacggctcagcggcggcgcatctttcgtttgcgtcgctttcaacagcgtcagctgcaggccatgcatcagaatcataaaaatcagcgccacgttaacgaagatattcagcggttttgggaaaggttgaaacaggttcaacagcaaaaacgcccaaacgcatagcatcagcaggcggcctaaattaatcagcatggttttctccttgtgcctcgcgttgatacaggcggtaggcgacctgtccggcgactttttcgcgatacagctgccagtttgccggaaccggcggtagtccgttttctacttcgctctcgacataaatcagcgcttcatcagcgagccagtggtttttttccagcaggctgagcgtttcttccagcagccctttgcggaagggggatcgacgaagacaatatggtgcggcgtacccggctggctgagaaacgccagcgtgttggtgttgaccaccttgccgttgttggctttcagcgtcgcgagatttttttgtagctgctgcgcgacgctgcgctccatctccagtagcgtggtgctggcggcatagcgtgacagcgcttccagccccagcgcgccgctgccggcgaagcagtcaaggcagtgggcgtcgaccatcgacggcgccagccagttaaatagcgtttcccgaacccggtcggtggtcgggcgcagacccgggctctccggcaccggtaatttacggccccgccactgtccgccgataatgcggatctggccgctgcctgcgtgatttggtttcttcatctctttgctcaagtctcaacttccagcctgctattctaacgatcgaagaccattgacgaaaccttaatccgggggcggtgatgcgagttaagttaagtgatagactatccaactaatttcatcattttttcagcttctgaagcggttgtgtcgaagctgcgccatgaataaacagcgaggagtgtggtcgcaaatggcaaaagagaaaaaacgtggcttcttttcctggctgggctttgggcaaaaagagcaggctcaggaaagcgaaactgaacaaaaagtagaagaacaacaagatgttgcggaacagtctccggcggcggaaacgcctgcggaagccgtacccgcggcggaaacggtaaaagaagaccccgaggcctttgccgccgaggtcgtagaggttaccgaacaggttgttgagagcgaactgccgcatccggtggtgaccgaagccgttgcacaggaaaaagtggctgaatcgccggcggcggaggaaatttctgccccagaggccgctgttgaagaagcgccggttgttcctgcggtagaagaaaaagtcgctgaaccgctggttgaagaggtaatagccgagccggttatcgccgaagcggtcgctgaacagacgccggaagaggttatcgtcgcggagcctgaggtcatcgaagatgagatcctcccggaagagtctgaagcggaactaagcgatgaagagctcgaagcacaagctctggcggcgcaagacgtagaagaggcgccggaagaagaagcggaaactcaggaagcggcgcagcaggagcaggaaaaaccgaccaaagaaggtttcttcgcccgcttaaaacgcagcctggtgaaaaccaaacagaatctgggttccggatttatcagcctgttccgcggtaaaaaaatcgacgacgatctgtttgaagagctggaagaacaactgctgattgccgacgttggggtggaaaccacgcgtaagattattaccaatcttaccgaaggggccagccgtaagcagctgcgcgacgccgaggcgttatacggtctgctgaaagaagagatgagcgagatcctgacgaaagtcgaggaaccgctgaatgttgaagggaaaacgccatttgttattctgatggtcggcgttaacggcgtgggtaaaaccaccacgatcggtaagctggcgcgtcagtttgagcagcagggcaaatccgtgatgctggcggcgggggatactttccgcgcggcggcggtggaacagctgcaggtctggggccagcgtaacgagatcccggtgattgcccagcataccggcgctgattcagcctcggttatttttgacgccattcaggcggcgaaagcgcgcaatattgatgtgttgattgccgataccgcgggtcgtctgcagaataaatcgcatctgatggaagaactgaagaagattgtccgcgtaatgaagaaactggacgtcgacgcgccgcatgaagtcatgctaaccatcgacgccagcaccgggcagaacgcgattagccaggccaaactgttccacgaagcggtggggctgaccggcataacgttgactaagcttgacggaaccgcgaagggcggggttatcttctcagtggctgaccagttcagtattccgattcgctatattggcgtcggcgaacgtattgaagatctgcgtccgtttaatgcgggcgactttattgaggcactttttgcccgagaggattaagaatgattcgctttgaacaagtcagcaaagcctatctcggtgggagacaagcgctgcaggggtgactttccacctgcagcagggcgagatggcgttcctgaccggccattccggcgcggggaaaagtaccctgctgaagcttatctgtggtatcgaacggccgagcgccgggaaaattctgttcagcggccatgatatcagccgcctgaagagccgcgaggtgccgttcctgcgccgccaaatcggcatgattttccaggaccaccacctgctgatggatcgcaccgtgttcgataatgtggcgatcccgctgattatcgccggcgccagcggcgatgatattcgccgccgcgtatccgcagcgctggataaagttgggctgctggacaaagcgaaaaatttccccatccaactctccggcggtgagcaacagcgtgtgggcattgcccgcgcggtggtcaacaagccggcggtgctgctggcggatgaaccgaccggtaacctcgatgaggcgctctcggaaggaattttacgtctgtttgaagagtttaaccgcgtaggtgtgacggtactgatggcgacgcacgacctggggcttatttccagccgtccgtaccgtgtcctgacgctgagcgacggtcatatgcatggaggccatcggggtgaataagcgcgacgcagtgaaccagattcgccagttcggcagcaagttcgatcgtctccgtaacgccacaggcggcggcagcggcgggcgcaatgcgccaaaacggccaaaagcggcgccgaacccggcatcgcggaagagtaacgtctttaacgagcaggtgcgctacgcctggcacggcgcattacaggatttaaaaagcacgccgctggcgaccttcctcaccatcatggtgatcgccatttcgctgacgctgccgagcgtctgctatatggtctacaaaaacgtcaacagcgcggcgtcgcagtattatccgtcgccgcagatcaccgtctatctggaaaaaacgctggatgacgatgcggcggcgcgggtggttggccaactgcaggcggagcagggcgttgagaaagtaaattacctgtcgcgagatgaggcgctgggcgagttccgcaactggtccgggtttggcggcgcgctggatatgctggaagagaacccgttgccggcggtagcgattgtggtgccgaagctcgatttccagaataccgattcgcttaacaccctgcgcgatcgcgtctcccgtattcagggagtcgacgaagtgcgcatggacgatagctggtttgcgcgcctggcgtcgctgaccgggctggtcggccgggtgtcggcgatgatcggcgtgctgatgatcgccgcggtattcctggtgattggtaacagcgtgcgcctgagcatcttcgcccgccgcgacaccattaacgtccagaagctgatcggcgctaccgacggtttcatcctgcgcccgttcctctacggcggcgcgctgctgggctttgccggggcatttttgtcgctgatcctgtcggagattctggtgatgcgcctctcctcggcggtgaccgaagtggcgaaagtgtttggtactaaatttgaactcagcggcttaggcttcgatgagtgcctgctgatgctaatcgtctgctcgatgattggctgggtcgcagcctggctggcgacggtgcaacatttacgtcactttaccccgactaaaaattttctggtataatctttccctgcactgaatatctctctgcagggaaagagtccctgttcgcctcttccctaatctttcatctccatgtcacattttgtgcgtaatttactcacaacgttgcatggaacttgtggataaaatcactgtctgatactactgtgggtgatattctcgttgctcataaatgctggcatgtttgttgcctgatggggacaagttcatgtcagacactatcgattgagaggatttgaatgaccaaagaaatgcaaactttagctttagccccgttggtaacctggaatcgtacatccgggctgctaacacttggccgatgttatcggctgatgaagagcgggagcttgctgaaaagctgcattaccagggcgatctggaagcagcgaaaaagctgattctgtctcacctgcgctttgttgttcatattgctcgtaactactcgggctatggcctgccgcaggcggacctgattcaggaaggcaacatcggtctgatgaaagccgtacgtcgtttcaacccggaagtgggtgtgcgactggtttccttcgccgtgcactggattaaagcggaaatccacgaatacgtgctgcgtaactggcgtatcgttaaagtcgcaaccactaaagcgcagcgtaagctgtttttcaacctgcgtaaaaccaagcagcgtctgggctggtttaaccaggacgaagtagagatggttgcccgcgagctgggtgtgtcgagcaaagacgtacgtgagatggaatcgcgtatggcagcgcaggacatgacctttgatatgtcgtccgatgacgaatccgatagccagccgatggcgccggtgctctatctgcaggacaaaacgtctaactttgccgacggcatcgaagacgataactgggaagagcaggctgctaataaactgactgatgcgatgcagggcctggacgagcgtagccaggacatcatccgcgctcgctggctggacgaggacaacaagtccacgctgcaggagctggcggatcgttatggcgtctcagctgaacgtgttcgtcagctggaaaagaacgcgatgaaaaaactgcgcgccgctatcgaagcttaatcttcgactttctgcgccgtagtgaattaagcctctgctgtttcagcgggggctttttgttttatatccccgtcatacccgtttcccctctccgcgcgatttgccgcgacctttagcttcagtcacataacttttacatctcctgcaaattgttgtttcaaattctgaaaaatggggtatgttttggcatagtgtgctgcaaaagcgcaggcggcagacccaaatgcagtcatactacacttagtatgactaaaaaatcagaataatgcgctgacaaacaacatcacaacaaatgcaaaaaccataataatggggagcctcaggatgaatatgaagggtaaagcgttactggcaggatgtattgctttaattatgagcggttcagcgctggcggaagacattaaaattgccgtcgtgggagcgatgtccggcccggttgcccagtatggcgaccaggaatttaccggcgctgagcaggcggtggccgatatcaacgccaagggcggtatcaagggcaacaaactgcagatcgtaaaatatgacgatgcctgtgacccgaaacaagcggtggcggtcgcgaacaaagtagtgaatgacggcattaaatacgttatcggtcacctgtgttcctcatccacccagccggcgtctgacatctatgaagacgaaggcatcctgatgattaccccggcggcaaccgcaccggagctgacggcgcgcggttataagctgattctgcgcaccaccggtctagactccgatcagggcccgacggcggcgaaatatattctcggcacggtgaagccgcagcgcatcgctgttgttcatgacaaacagcaatatggcgaagggctggcgcgctcagttcaggaaaacctgaagaaaggcggcgccaacgtggtgttctttgacgggatcaccgccggtgagaaagatttctcgaccctcgtggcgcgcctgaagaaagaaaatatcgacttcgtctactacggcggttatcacccggaaatggggcaaatcctgcgccaggcgcgcgcagccggtctgaaaacccagtttatgggcccggaaggcgtggctaacgtttccctgtctaacatcgccggcgagtcagcagaaggcctgctggtaaccaaaccgaagaactacgatcaggttccggcgaacaaaccgattgtggatgccatcaaagcgaagaaacaggatccgagcggcgccttcgtgtggaccacctatgcggcgctgcagtcgctgcaggcggggttaaatcagtctgaggatccggcggaaattgcgaaatacctgaaaggggccaaggtggataccgtcatggggccgctgtcgtgggatgagaaaggcgatctgaaagggttcgagttcggcgtgtttacctggcatgcaaacggtacagcgaccgacgccaaataatttaaccggcgcctttcacgccgcagatgcgttgtctgcggccctcaaccccggtcacttactgatgtaagctcccggggatttcgggtcttgacgccttgctgcaacgcgaaatgctgggttaaatgtgagggcgcctttcacgccgcagatgcgttgtctgcggccctcaaccccggtcacttactgatgtaagctcccgggatttcgggtcttgacgccttgctgcaacgcgaaatgctgggttaaatgtgagggcgcctttcacgccgcagatgcgttgtctgaccccggtcgcgctgcgcttaccggggctacggcttaatgcttctcccaaccattctgctgggcgctgaaaccgagcgcctgcataaatgccgccatcacgccgcggtcttccaccccgctatcggcaacgcgccagctattgatattcgggttatcgcttaacgtctcttccactaaatattgcccaacgccgcggcggcgggtgacttcacgcacgcacagatcgctgagctcgccttcgacgccacgcaaggtaacgcgtacggcgccgagcaggcgttcgttaaagcgggcggcgtaaatacgatggttttcatccagcgtcagcgccgcaggatcctgcgacggccagattttgcctaaatcaatgcgatcctgatcgctgaagtgctgtaaacggataatggtgagcttcatacgcggcagttccagtcaaaacagatgcgacagtgtactcaaatttcttgtccggcggggcgctgttttcaactcattcattaggggattcgttttcctggttgcgcgggggtagcgcaatacattatggatcgaaaaataagcagaattttaacctgatatgtagcgttttattccgccttatatgccgttattttatgctgctaactggacttttttttgtttatcttcgcctaaaaccagaatattatcttttcttaattacctgaaaaatagagattttaatcataattcaggtaaaaaactgcgctaaaccattaaagttcatggtaaaaatggcgttgtttaataaaagcacagaatgctttttaaccataaaaatacaaaacatttacatcacatcacgaacggggttctgaagcatgaaaaggaacgcgaaaacgatcgtcgcgggagtcgttgcattagcgatttcccacgcggcgatggcaaaggatattaaagtcgccgtcgtcggcgcgatgtctggcccggttgcccagtggggcgatatggaattcaacggcgcgcgccaggcgattaaagacattaacgccagcggcggcattaaaggcgacaaactggttggcgtcgaatatgacgacgcctgcgatccgaaacaagcggtcgcggtcgccaacaaaatcgttaatgacggcattcactacgttattggccacctctgttcctcctccacccagccggcgtctgacatctatgaagatgaaggcatcctgatgatctcccccggggcgaccaacccggaactgacccagcgtggctaccagtacattatgcgtaccgccgggcttgactcttcccaggggccgaccgccgcgaaatatatcctcgaacacgtgaagccgcagcgtattgcgattattcatgacaagcagcagtacggcgaagggctggcgcgttccgtgcaggacagcctgaagaaagccggcgccaatatcgtcttctttgatggcattaccgccggtgagaaagacttctccgcgctgctggcgcgcctgaagaaagagaacatcgactttgtctactacggcggttactacccggaaatggggcagatgctgcgccaggcgcgctccgtcggcctgaaaacgcagtttatgggcccggaaggcgtcggtaacgcctcgctgtccaacatcgccggcgcggcggcggaaggtatgctggtgacgatgccaaaacgctatgaccaggatccggccaacagcgctattgttgatgcgctgaaagcggataaaaaagatccgagtggtccgtacgtctggatcacctacgccgccgttcagtcgctggcgcaggcgatggacagaaccggcagccagcagccgctggatttaattaaagatttgaaagctcacggcgcgaagaccgtgattgggccgctgaattgggatgaaaaaggcgatctgaagggatttgaatttggtgtcttccagtggcacgcggatggttcatccaccgtcgctaagtaagacgcgttatcccaccgcccgcatcgcgcgggcggcatgaaaaaggttaccttatgtccgagcagtttctctattttctgcagcagatgtttaacggcgtcacgctgggcagtacctatgcgctgatcgctatcggctatacgatggtgtacggcattatcggcatgattaacttcgcccacggcgaggtctacatgatcggcagctacgtctcgttcatgattatcgccgccctgatgatgttggggatcgataccggctggctgctggtcgccgcaggctttatcggcgctatcattatcgccagcgcctacggctggagtatcgagcgcgtggcctatcggccagtgcgcagctccaagcgcctgatcgcgctgatttccgccatcgggatgtcgatattcctgcagaacttcgtcagcctgaccgaaggctcgcgcgatgtcgcgctgccgagtctctttaacggccagtggattgtcggccacagcgataatttctccgccactatcactaccatgcagctggtcatctgggtcgttacctttatcgccatgctggcactgacgctgtttattcgctattcgcgaatgggccgcgcctgtcgcgcctgtgcggaagatctgaaaatggcgagcctgctgggcatcaataccgaccgcgttattgcgctgaccttcgtcattggcgcagcgatggcggcggtcgcaggcgtactgctggggcagttctacggcgttattaacccctacatcggctttatggccgggatgaaggcctttaccgcagctgtactcggcggtatcggtagtatccctggcgcgatgatcggcggcctgattctgggtatcgccgaggcgctctcttctgcttatctcagcaccgaatataaggacgtcgtctccttcgcgctgctgattctggtgctgttagtgatgccgaccggcattctgggccgcccggaggtagaaaaagtatgaaaccgatgcaaattgcgatggcgctgctttccgccgcgatgttctttgttctggcgggcgtctttatgggcgtgcagctggagctgaatggtaccaaactggtggtcgataccgccgccgatattcgttggcagtggatcttcatcggcaccgcggtagtctttttcttccagctgctgcgcccgctgttccagaaagcggttaagaacgtctccgggccgaaatttattatgccggcgattgacgggtcgacggtcaagcagaagctgttcctgatagccctgctggtgattgccgtggcctggccgtttatggtgtcgcgcggtacggtggatatcgcgactctgacgatgatttatatcatccttggcctcggactgaacgtggtggttgggctttccggtctgctggtattgggctacggcgggttttacgccatcggcgcctatacctttgcgctgcttaaccactattacggtctcggcttctggacctgtctgccgctggccggcctggtctccgcggcggccggcttcctgcttggcttcccggtgctgcgtctgcgcggcgactatctggcgattgtgaccttaggcttcggcgagattgtgcgtattctgctgctcaacaataccgagatcaccggcgggccgaacggtatcagccagatcccgaaaccgaccttctttggtcttgaatttagccgtaccgcccgcgaaggcggctgggataccttcagtaacttcttcggcctgaagtacgatcccagcgaccgggtgattttcctctacctggtggcgttgttgctggtggtgctcagcctgttcgttattaaccgtctgctgcggatgccgctcggacgggcatgggaagcgctgcgtgaagatgaaatcgcctgtcgttcgctgggcctgagcccgacgcgcatcaagctgaccgcctttactatcagcgccgcgtttgccggcttcgccggcacgctgttcgccgcgcgccagggcttcgtgagcccggagtcctttaccttcgccgagtcggcctttgtgctggcgatcgtcgtgctgggtgggatgggctcgcagtttgcggtgatcctggcggctattctgctggtggtatcgcgcgagctgatgcgtgatttcaacgaatacagcatgttaatgctcggtgggttgatggtgctgatgatgatctggcgtccgcaggggctgctgccgatgacacgcccgcagctgaagctgaaaaacggtcaggcgaaaggagaacaggcatgagtcagccaatattatccgtgaacggcctgatgatgcgttttggcggcctgctggcggtcaataacgtctcccttgagctgcgtccgcaggaaattgtttccttaattggcccgaacggcgcgggtaagaccaccgtttttaactgcctgaccggtttctataagcctaccggcggcaccattatgttgcgcgaccagcacctggaagggctgccggggcagcagattgcgcggatgggggtggtacgaaccttccagcacgtgcgtctgttccgcgaaatgacggtgattgaaaatctgctggtggcgcagcatcaacagctgaaaaccggcgtcttctccggtctgctgaaaacgccggccttccgtcgcgcacagagcgaagcgctggatcgggccgccacctggcttgagcgtatcggcctgctggagcatgccaaccgtcaggccagcaacctggcctacggcgaccagcgccggctggagattgcccgctgtatggtgacgcagccggagatcctgatgcttgatgaaccggcggcggggcttaacccgaaagagaccaaagagctggatgagcttatcgccgagctgcgtagccatcacaacaccaccatcctgcttatcgaacatgatatgaagctggtgatgggcatttccgatcgcatctacgtcgtgaaccaggggacgccgctggccaacgggacgccggaagagattcgtaataacccggacgtgatccgcgcctatttaggtgaagcataatggtggtgacgcataagatggaaaaagcgatgttaacttttgacaatgtcagcgcccactacggcaagattcaggctctgcacaacgtcagcctgcatatcaaacagggtgagatcgtcacgcttatcggcgctaacggcgcggggaaaaccaccctgctcggtacgctgtgcggcgatccgcgggcctccagcgggcgcattgtctttgacggtaaggatattaccgactggcagacggcgaaaatcatgcgtgaagcggtggcgatcgtgccggaaggacggcgcgtcttttcgcgcatgacggtggaagagaacctggcgatgggcggtttttttgccgaccgcgaccagttccatacccgcatcaaatgggtgtatgagctgttcccgcgtctgcatgaacgtcgtattcagcgggccggcaccatgtccggcggcgagcagcagatgctggcgatcggtcgcgctctgatgagccagccgcgcctgctgctgcttgatgagccctcattagggctggcgccgattatcattcagcagattttcgataccatcgagcagctgcgtgagcaggggatgactatcttcctggttgagcagaacgccaaccaggcgctcaagctggccgatcgcggctacgtactggaaaacggtcacgtggtgctggaggataccggcgacgcgctgttggccaacgaggcggtgcgcagcgcctatctcggcggttaatacatcgtaacccggcgtcattcatttcgccggtttgtagcccgggcgaggcgcttgcgccgaccccgggagccgatcgcacgaatattatccgtgtctcagctcccactttacttcccccgtcctttcatcggcttgtcatctccctgacccgttactatcttttttttgtaataaaaaagttatttttctgtaattcgaacatgtcatgttaccccgcgaacataaaacgcgtgaaatcgcgcatccggaacaacaagagagataaccgatgatatcgttacgacatacagctttaggactggcgttgagcctggcatttgctggccaggcactggcagtaaccaccatccctttctggcactcgatggaaggggaactgggtaaagaagttgattctctggcgcaacgtttcaacgcggccaatcctgattacaaaattgttccgatgtacaaaggcaactacgagcagagcctgagcgccggtatcgccgccttccgtaccggcaacgcgccggcgattctgcaggtgtatgaagtcggcaccgccaccatgatggcgtcaaaagctattaagccggtgtaccaggtctttagcgatgcgggtattaagttcgatgaatcgcagttcgtaccgacggtgtccggttattacaccgattcaaaaaccggccatctgctctcccagccgtttaacagctccacgccggtactgtactacaacaaagacgccttcaagaaagcgggtctggaccctgagcagccgccgaaaacctggcaggatctggcggcctacaccacgaagctgaaagcggccggaatgaagtgcggctacgccagcggttggcagggctggatccagattgagaacttcagcgcctggaacggcctgccggtcgccacgaaaaataacggctttgacggtaccgacgcggttcttgagttcaacaagccggagcaggtgaagcatatcgcgctgctcgaagagatgaacaagaagggcgatttcagctatttcgggcgtaaggatgaatccaccgagaagttctataacggcgactgcgcaatgactaccgcgtcatccggctcgctggcggatattcgtcagtacgcgaaattcaactacggcgtaggcatgatgccttacgacgccgatgttaaaggcgcgccgcagaacgccatcatcggcggggccagcctgtgggtgatgcagggcaaggacaaagagacctacaccggcgtggcgaagttcctcgacttcctgaccaaaccggaaaacgccgccgagtggcaccagaaaaccggttacctgccgattaccaccgcggcctacgatctgacgcgccagcagggtttctatgataagaacccaggcgctgatatcgccacccgccagatgctgaacaagccgccgttgccgttcaccaaaggcctgcgtctgggtaacatgccgcaaatccgcactatcgtcgatgaagagctggaaagcgtttggaccggcaagaaaaccccgcaacaggcgctggattccgccgttcagcgcgggaatcaactgctgcgccgtttcgagcaagcaaccaaatcgtaatatgaaatgccgggtggcggcttcgccttacccggcctacaaagtacatgtaggccggataagcgtagcgccatccggcactgctcaggaataaaatcttcatgtcatcatcccgtccggtattccgctcgcgctggctgccctatgtgctggtcgcgccgcagctgattatcacgttaattttctttatctggcccgcgggcgaagcgctgtggtactcgctgcagagcgtcgatccgtttggcctttccagccagtttgtcggcctggataacttcgtcacgctgttccacgatccgtactatctggactcgttctggacgactataaaattcagcaccctggtgaccgttagcggcctgctcgtttcgctgttttttgccgcgctggtcgactatgtagtgcgcggcagccgcttttatcaaacgctgatgctgctgccgtatgccgttgctcccgccgtcgcggcggtactgtggatcttcctcttcaatccaggacgcgggctgatcactcatttccttggcgaactgggttacgactggaaccacgcgcaaaacagcggacaggcgatgtttctggtggtctttgcctcggtctggaagcagataagctacaacttcctgttctttttcgccgcgctgcagtcgatcccgcgttcgctggttgaggccgccgccatcgacggcgccgggccgattcgccgcttcttcaagctggcgctgccgctgattgcgccggtgagtttcttcctgctggtggtcaacctggtttacgccttcttcgacaccttcccggtgatcgatgccgccaccgccggcggcccggtgcaggcgaccaccaccctaatctacaaaatttatcgcgaaggtttcgccgggctcgatctttccgcttccgccgcgcagtcggtggtgctgatgttcctcgtcattatcctgacggtggtgcagttccgttacgttgaaagtaaggtgcgttaccaatgattgagaaccgtcgcgggctgacgtttttcagccacaccatgctcattttgggtattgccgtcattctattcccgctgtacgtcgccttcgtggcggcgacgctggataacaaatcggtgtttgaaacgccgatgacgctgatccccggcggacatctgctggagaacatgaagaccatctgggtgaacggggtcggcgtcaacagcgcgccgttctggctgatgatgctcaacagcttcatcatggcgttcgccattacggtaggcaaaattgtcgtgtcgatgctttcggcattcgccatcgtctggttccgcttcccgctgcgtaacctgttcttctggatgatttttatcactctaatgctgccggtcgaggtgcgtattttcccgacggtggaagtgatcgccaacctcaaaatgctcgacagttatgccgggttaacgctgccgttaatggcttcggctaccgctaccttcttgttccgccagttctttatgaccctgccggacgagctgattgaagcggcgcgcattgatggcgcttcgccgatgcgcttcttccgcgacatcgtgttgccgctgtcgaaaaccaacctcgccgcgctgttcgtcatcacctttatctacggctggaaccagtatctatggccgttgctgattattcaggatgtgaatcttggcaccgccgtcgccggtattaaaggcatgatcgccaccggtgaaggtactacccagtggaatcaggtgatggcggcgatgctgctgaccctgatcccgccggttgtcatcgttttagccatgcagcgcgcgtttgtgcgcggcctggtcgatagtgagaaataaaatggctggtttaaaactacaggcagtaagcaaaagctgggatggcaaaacccaggtgattcaaccgctgacgctggacgtggcggacggggaatttattgttatggtcggcccgtcgggctgcgggaaatcaacgctgctgcggatggtcgcgggacttgaacgggtgaccagcggcgatatctggattgatcgtaaacgggtgaccgagatggagccgaaagatcgcggcatcgcgatggtgttccagaactatgcgctttatccgcatatgagcgtggaagagaacatggcgtggggtctgaagattcgcggcatgggtaagggattaattgccgagcgcgtgcaggaggcggcgcgtattcttgagctggatggcctgctcaagcgccgcccgcgggaactgtccggcggtcagcgccagcgcgtggcgatgggccgcgctatcgtgcgtgacccggcggttttcctgttcgacgaaccattgtcaaacctcgacgccaagctgcgcgtgcagatgcgtctggaactgcagcagctgcatcggcgcctgaaaacgacctcgctgtatgtcacccacgatcaggtcgaggcgatgactctcgcccagcgggtgatggtgatgaataaaggtattgccgagcagatcggcacgccggttgaggtgtatgaaaagcccgccagccgctttgtggcgagctttatcggcagcccggccatgaacctgctggaggggcgggtgagcgatgacggcggtcgctttgagctggaaggcggcatacagttgccgatgaatcacgagcatcggcgttacgccgggcgtaaaatgactctcggtattcgcccggaacactttattttaagttcgcaggcgcaaggcggcattccgctgctgatggatacgctggaaattttaggtgccgataacctcgcccacgggcgctggggcgagcagaagctggtggtcagattgccgcatcagcagcgcccggcgggcggcagtacgctatggctgcatctgccattggaacatctgcacctctttgatggtgaaacaggacaacgcgcatgagtaactggccttatccccgcatcgtcgcccatcgcggcggcggtaaactggcgccggagaacaccctggcggctatcgacgtcggcgcccgctacgggcacacgatgattgagtttgacgccaagctgtcgaaggacgggcagatctttctgctgcatgacgataatctcgaacgcaccagcaatggctggggcgtggcgggcgagctggcgtgggacgacctgctgaaggtcgatgccggcagctggtacagccgtgaatttaagggcgaaccgctgccgctgctctcccaggtggcggaacgctgccgccgtcacggcatgatggcgaatatcgaaattaagccgactaccgggcaggggccgcagaccggcaaagtggtggcgctggccgcgcgcgatctctgggccggtatgaccgcgccgctactctcatcctttgaaatcgacgcgctggaagcggcgcaggaagccgcgcccgagctgccgcgcgggctgcttctggatgagtggcgcgatgactggcgcgaattgaccgcccggctgggttgcgtatccattcatctcaaccacaagttgctggacgcggcgcgggtagcaagcctgaaacaggccggactgcatattctggtgtatacggtcaataaaccccagcgcgccgcggagctgctgcgttggggcgtagattgcatctgcaccgatgctattgacgtcatcgggccgaatttccagccttaagactgatttgcggcggacgatctttacgggttagtctgccgcagcatcccaccgttgttgttcggcagtacctgcggctgcgaattgagattgccgccctgcgccgcgcgctgctgattggtctgcagctgattttgcaaatgctgttgctgcatatgcgtctgattattcagattctgcttcagcatgctttgctgctgctgttgctgcaccttcatctcattttgcatacgctgctggctgggcaccacataacccggctggttagggttgttatcgatgttgatcggctgtgctaaaacgccgagcggcatcagcgccgccaggaataaaatcgctttcattgttttctcctcccgtgcgtgggatcacttaagtgtacctcgaattcgccataacaatgattttttaggagttatcaaccaggcttaagccgggatataaaacctacctttcaggagtaagacaatgataaaaacaacaatatggcgtcaggtggtcatcgcagcgttactggcgggggcagctttaccgtcgccgccaatccgccgcccccgccgccggtctcgtatggcgttgaggaagatgtgtttcaccccgtgcgcgcccagcaggggatggtggcctcggtggatgcgctggcgacacgcgtcggcgtagatattctgcgtcagggcggcaacgccgtcgatgcggcggtggctgtcggttacgcgctggcggtcacgcatccgcaggccggtaatatcggcggcggcgggtttatgatgctgcgaactaaagacggtaaaaccacggcgatcgatttccgcgagatggctccggaacaggccacccgggatatgttcctcgatgaacatggcaatcctgacagtaaaaaatcgctgacttcgcatctcgcttccggtacgccaggcagcgtcgcgggcttctccctcgcgctggaaaaatacggcaccatgccgctgaacaaggtgctccgcccggcgattaagctggcggaagagggctttatcgttaacgatgcgctggctgatgatttaaaaacctacggcagcgaagtgatcccgcagcatgaaaacagcaaagcgattttctggaagaacggcgaaccgctgaaaaaaggcgaccggctggtgcaaaaaaatctgggtaaaagcctggagctgattgccgagcacggcccggatgccttctataaaggggctatcgccgaccagattgccggtgagatgaaaaaacacggcgggcttatcaccaaagccgatctcgccaactatagggccgtggagcgtacgccgattagcggtgaatatcgcggctatgaggtctactccatgccgccgccgtcctctggcgggatccacatcgtgcagatcctcaatatcctcgaaaacttcgatatgcagaaatatggctttggcagcgccgacgccatgcaggtgatggcggaagcggagaaacacgcctacgccgaccgttcggaatatctcggcgaccctgacttcgtcaaagtgccgtggcaggcgctgaccagcaaagcctacgccaaagcgatcgccgctgagatcgacgtcaacaaggcgaagccttccagccagatccgcccgggcaaactggcgccttatgaaagcaaccagaccacccacttctcggtggtcgataaagacggcaatgcggtggcggtgacttatacgttgaataccacctttggtaccggcatcgtggctggcgactccggaattatactcaataaccagatggatgatttctcggcgaagcccggcgtgcctaacgtctatgggctggtgggcggcgacgccaatgcggtagggccgaaaaagcgtccgctgtcgtcgatgtcgccaactatcgtagtaaaagacgggaagacctggctggtgaccggtagcccgggcggtagccgaattatcaccaccgtactgcaaatggtggtcaacaccattgattttgggatgaatgtcgcggaggccaccaatgcgccgcgcttccaccaccagtggctgccggacgagttgcgggtggagaaaggttttagcccggataccgtgaaattgctggaagcaaaggggcagaaagtcgcgctgaaagaggcgatgggcagtacccagagcattatggtggggccggacggcacgctgtatggcgcttccgatccgcgttcacccggtgatttgaccgcagggtattaaggtgttgcccggtggcgctgcgcttaccgggcttacaattgcacaaaagtaagccgggtaaggcgaagccgccacccggcaacacgctacttcattctcgccatataatacgcatccacatactcgccgttgcgcaatgcgtaacgcctggcggtgccttcgatctcaaagccgtacttcttatacaccgcgaccgccggggcgttatcggcaaagacggtgagttcgatgcgatcgacgcgcagccagttgtcgcacatatcaatcatggtgcgcatcagcgcgctggcgacgccgcggttgtgccagcgcgaatccacgctgataccaaaatcggcgacgtgactacggcggggacgttggatgacggcaatgcataaatggccgacgacttgcccatcgatacaggccaccagttgcttcacgccgggcgtatcggttagccgctcccgccacatatgctcggatggatgagggacctgtagcgtgttgtgatacacctccggctgggcgtgaatttgacgaatcgcgtcaacatctttcggttcagcatggcgtatcacgatatcactcattccttgttcctcattcaggtgaaaagtccctttaaacatcactgagtacggcgttcgagtcaacacgcattatttgcaaaaaaaagtagacaagtgcgaatgagaatgattattattgtcctgcattcagggagacccttgcggaaagcctgaaagcacgacattgctcacattgcttccagtattactttagccagccgggtgctggcttttttttgcgctcatttcaggcgtgttgcgcttttacgggtttcgtcccttcttccgggaccaggccgacgatattgcttttgtttttgctttccgccgcggccaatacctcagcactgccggtaaataagccgccctttttaatcgccagcgcgcgataggcgagggtgccgtcgatgttgccatgttcctcaatagcgatgctatcgccacggcactggccgtgtactttgccgtcgacgatcagctcgcggcagtggatattgccctcaacctgaccttcgcgcatcaccttaatcagatgttctttggcctcaatgttgccggtgacctggccgtggatatagacatggccgtaggcgacgatgttgccgacgaaatgaaccccgctggcgatcaccgtggtttcctgttttttgacgcttgctgtttctggctctgttgtcgccacggttggcgcagcgacttcagtagcctgcgcttcggttttatttttcttcataaacatagcgttaattttttccctttgggtatgaataaggaatgcgaagagggtacaggcggccgcaaggcgcgccagcgcaatctcatcgctaaaccaggcgatcaaagcgagaagccagaaacacatggcacagtttatggcgagatacgttttttccatcagcagcggctggctactccgttagtctttagcaacgtcctggttgcccctcacttatgcgcagttttgccatcgaaagcaagcatttcagtagagaaatgaaaaatatttatttattaatcaattgcttatcaataattatatatgggtggtagccgagatattttattggtgaattctcctggctggcggaaaggggggtgaagtgagcccccggcttgcgctatggttaaaggcagcacatcaactaaggacagcgttatgattctgcactgcgcatttattggtttcggtaaaagcacgacccgctatcaccttccttatgtcctgcatcgcaaagagcgctggcacgtcgcgcacatttatcgccgccgcgccaggccagaagaacaggcgccggcgtattcccatatccatttcaccagcgacctcgatgaagtgctgaacgacccgcaggtcaaactggtggtggtctgcacccatgccgatagccacttcgaatacgcgaagcgggcgctggaagcggggaaaaacgtactggtcgaaaagccctttaccccgacgctggcagaggcgaaagccctgtttacgctggcgaaaagcaaagggttgacggtgacgccttatcagaaccgccgcttcgactcctgtttcctgaccaccaaaaaggtgattgaaagcggtaagctcggcgaactggtggaaattgaaagtcattttgataactaccgaccggtggcggaaaccatccaggggggaccgcaaagcggcgatttctacggccttggcgtgcataccatggaccagatcatttcgctgtttggtcgcccggatcatgtttcctacgatctgcgctcactacgtaataaagccaatcccgatgacacgtttgaagctcaactgttttatggcgacctgaaagcgatcgtcaaaaccagccatctggtacagattgactacccgaaattcatcgttcatggccataaaggctcgtttgtgaaatatggcattgaccagcaggagaccagcctgaaggccaacattatgccgggcgatgcgggattcggcgctgatgacagcgtagggcaactggtctacatcaacgaggcgggcgtggaggtacgtgaagaggtgccgctggaaagcggtgactacggacgagtgtatgacgcgctctatgacaccctcgttaacggccagccgaattacgtcaaggaatctgaagttctcaccaatatggagattctgcagcgcggctttgaacagccttctccggccaccattaccctcgcaaaataagaaaaacaggctcctcgtcgtttgttcatattttttgaacagaggagtcaattttcaccctctatgatcgccggcggaatgggtccacacttactccatcgaaaacatacgggggtgcaacatgatctacttacgcaaagctaacgaacgtggccacgctaaccatggctggctggattcctggcatactttctctttcgccaactactacgacccgaactttatgggtttctccgcgctgcgcgtgattaacgatgacgtgatcgacgccggtcaggggtttggcacccacccgcacaaagacatggaaatcctgacttatgtgctggaaggcgcggttgagcaccaggacagcatgggtaacaaagagcaggttccggctggcgagttccagatcatgagcgcgggtaccggcgtgcgtcactctgagtacaacccgagcagcactgaccgcctgcgtttgtatcagatttggattattccagaagaaaccggcattacgccgcgctacgagcagcgccgctttgatgccgcgcagggcaaacagctggtgctgtcgccagatgcgcgcgaagggtcgctgaaagtacatcaggatatggagctgtatcgctgggcgctgctgaaagatgagcagtcggttcaccagattgccgcggaacgtcgcgtgtggatccaggtagtgaaaggcgaagtgacgattaacggcaccaaagccaccaccagcgatggtctggcgatttgggacgagcaggcgatttcggttcacgccgacagcgatagcgaaatactgctgttcgatctgccgccggtttgatagttatctgagccaggttaaataaattgcgcaaccttctccaacatcggggaaggttgcgctttgtccgtgataaactgagaaaatgtttcccagccgatcacagtcaggacgatgaaaaagaaaagacccgtacttcaggatgtagccgatcttgtcggcgtgaccaaaatgacggtcagtcgctatttacgtaacccggaacaggtttctgaggccctgcgtggcaagattgccgttgcactcgatgagctgggttatattcccaatcgcgctcctgacattctctccaacgccaccagccgcgccatcggcgtgctgctgccctcgttaaccaaccaggtcttctcggaagtgttgcgcggcattgaaagcgtcaccgacgccttcggctatcaaaccatgcttgcgcactatggttataagccggagatggaagagaagcgcctcgaatcgatgctttcctggaacattgatggcctgatcctcactgaacgtacccatacgccgcgcacgttgaaaatgattgaagtggccgggatcccggtggttgagctgatggacagccagtcgccgtgcctcgacattgccgtcggtttcgataacttcgaagcggcgcggcagatgacggcggcgattatcgcccgcggtcaccgccacgttgcttatctcggcgcgcgtcttgatgaacgtactatcatcaaacagaaggggtacgagcaggcgatgctcgatgccggcatgacgccctatagcgtgatggtggagcaatcttcttcctactcgtcggggattgagctgatgcgtcaggcgcgtcgcgaatatccgcagctcgacggcatcttctgcaccaacgatgaccttgcggtcggcgcggcgttcgagtgtcagcgtctggggctgaaaattccggacgacatggcgatagccggtttccacggtcacgatatcggtcaggtgatggagccgcgtctcgccagcgtactgaccccgcgtgagcgcatggggcgtattggcgccgagcgtctgctggcgcgcatccgtggagagacgattacccctaagatgttagatttaggtttcacattgtcaccgggcggatctatttaaaccgacaagtttgaagtagatcacacatattcacatctggcacgaatggttattgcttctcccagggtccggcatgacaatgttaccgataacagttacccgtaacacttgcccgtaatcattaaccgatacgccgccttcgcgctgtatgagtcagcaccggcgcggcgtaccagtccagtgggaggacgctttgagcacgactaaccatgatcaccacgtctatgtcctgatgggcgtttccggcagtggtaaatccgccgtcgccagcgaagtggcgcatcaattgaaagccgcgtttctcgatggcgattttctgcatccgcgcagcaacatcaccaagatggcttccggcgagcctctgaacgacgatgaccgcaccccgtggctgcaggcgttaaatgacgcggcattcgccatgcagcgcaccaacaaagtttcgctgatcgtctgctcggcgctgaaaaaaagctaccgcgacattctgcgcaagggcaacccgaacctctcctttatctacctgaaaggcgacttcgacgtgattgaaagccgtctgaaggcgcgtaaagggcacttcttcaaaacccaaatgttggtgacgcagtttgaaacgctgcaggaaccaggcgctgacgaaagcgatgtgcttatcgtcgatatcgaccagtcactcgaaggcgtggtcgccagcaccattgaggtgattaacaaaggcagtaactagtgagtactttaacgcttgttttgacagcagtcggctcggtattgctgctgctgtttttagtcatgaaggcgcgtatgcacgccttcgtggctttgatggtggtttctattggcgcaggtctcttttccggtatgccgctggataaaatcgcggcgacgatggaaaaagggatgggcggcacgctgggcttcctggcgatagtcgtcgcgctgggcgcgatgttcggtaaaattttgcatgaaaccggcgcggtcgaccagattgcggtgaaaatgctgaagtccttcggccacaaccgcgcgcactatgcgattggccttgctggccttatctgcgcgttaccgctgttcttcgaagtggcgatcgtattgctgattagcgtcgcgttctccatggcgcgccataccggcactaaccttgtgaagctggtgatcccgctgtttgccggcgtagccgccgccgcggcattcctgctgccggggcctgcgccgatgctgctggcttcgcagatgcacgccgatttcggctggatgatcctgattggcctctgcgccgctattccggggatgattatcgccggcccgctgtggggcaacttcatcagccgctatgttgagctgcacattcctgacgatattagcgaaccgcatctcggcgaaggcaaaatgccgtccttcggctttagcctctcgctgatcctgctgccgctggtgctggtcggcctgaaaaccatcgccgcgcgctttgtgccggtgggatccaccgcctatgaatggttcgagtttatcggccacccattcaccgcgattctggttgcctgtctggtagcgatttacggcctggcggtacgtcaggggatggcgaaagatcgcgtcatggagatctgcggcgcggcgctgcagccggcgggtattattctgctggtgattggcgcaggcggcgtcttcaagcaggtgctggtggactccggcgtcggcccggcgctcggcgaagcgctgactggcctgggtctgccgattgcgattacctgcttcgtgctggcggctgccgtgcgtattattcagggctccgcgaccgtggcgtgtctgacggcggtcggcctggtaatgccggtcattgagcaactgaactacagcggcgcgcaaatggcggctctctccatctgtatcgcgggtggttcgattgtggtgagccacgtgaacgatgccggcttctggctgttcggtaagttcaccggcgccagcgaagcgcaaacgctgaaaacctggacgatgatggaaaccatccttggcaccaccggcgccattgtcgggatgattgccttccagctgctgagctaagtaaaaataatttccccggacgccaccacggtatccgggggaaaaaccagggtaataccgtttaccctggattctctttgataacacgcctttttctcctcttttccttttccttctaccgtgaatatcagcgctacgacaatgatcgtattgctcgtcaggccttgcggcacaaggctttgtccgttttttttcgcaagcgtgaaagcgatatttttcgtgccgaatccataatcaggatcaataaaatagcgacggaaaatattccattgcgcgggttatttgcccgataatctttacgctttttatgactaccagcgacggtaggcggagtgcgggataagttgcttttctgattggcgcgcaatcattgattaatttcacttgcgactttagctgcattttgtaatgtgaaggacatcccagttggaaactggcctggcactaacagcacacacctcgcaggaatacgttatgaaaaatgttggttttatcggttggcgtggaatggtcggctctgttctcatgcaacgcatggtggaagagcgtgatttcgacgccattcgccctgttttcttctccacctctcagctgggtcagcccgctccgtcattcggcggcagtaccggtggtacgcttcaggatgcattcgatctggaagcgctgaaggcgctggacattattgttacctgccagggcggcgattacaccaacgagatttacccgaagctgcgcgcaagcggctggcaggggtactggattgacgcggcgtcttcgctgcgcatgaaagacgatgcgatcattattctcgacccggttaaccaggatgtgattaccgctggcctgaataacggcatcaaaacctttgtcggcggcaactgtacggtgagcctgatgctgatgtccctcggcggcctgtttgcccatgacctggtggagtgggtcagcgtggcgacttaccaggcggcttccggcggcggcgcgcgtcatatgcgcgaactgctgagccagatgggccaactgcatggccacgtggcaagcgagctggcgaacccggcttccgcgattctcgatatcgagcgcaaagtgacgtcgctgacccgcagcggcgacctgccggtcgataactttggcgtgccgctggcaggcagcctgatcccatggatcgacaaacagcttgataacggccagagccgcgaagagtggaagggccaggcggagacgaacaaaattctcgccaccgcgtcgccgatcccggtcgatggtctgtgcgtgcgcgtcggcgcgctgcgctgccacagccaggcgtttaccatcaagctgaagaaagatgtttctatcccgaccgttgaggagctgctggccgcgcataacccgtgggctaaagtggtgccaaacgatcgcgacattaccatgcgcgagctgaccccagccgcggtgaccggcaccctgaccaccccggtagggcgcctgcgtaaactgaacatgggtcctgagtacctgtcggcctttaccgtcggcgaccagctgctgtggggcgccgccgaaccgttgcgccgcatgctacgacagctggcgtaaacgcaggacaaacgataagggtgtggatacaccccttttttttgcgtaatacaaggagtaaacgcggatgttggatttttccccacggaggtaacgcagccttggctatgctttaagtaaggagttccttacctgaaggtgggacggagcaggaggatgcacgttggtgctgcgccgttcaggtcaaaaaagtcgccgggtacaggaaagggcgacacttacaacaggatgaaagcatgtcgaatcgaatcgatagagacgtgattaatgcgcttattgcaggtcatttcgcggatcccttttccgtgcttggcatgcaccgcaccgaggcggggctggaagttcgcgcattattaccagacgccaccgaagtgtgggttattgaaccgaaaaccgggcgtaaagtcggcaaactcgaatgcctcgactcgcgcggattctttagcggcctcctgccgcggcgtaaaaacgcttttcgctaccagctggccgtcacctggcacggacagcaaaacctgattgacgacccttaccgtttcggcccgctgctgcaggacgttgatgcctggctgttgtccgagggaacgcacctgcgcccttacgaaaccctgggcgcgcacgccgacaccatggatggcgtcaccggtacgcgcttttcggtctgggcgccaaacgcccgtcgggtctcggtggtggggcaatttaactactgggatggccgacgccatcccatgcgcctgcgtaaagagtccggtatctgggaactcttcattcccggcgcgcttaatggccagctgtataaattcgagctgatcgacgctcatggcaatctacgcgtcaaagccgatccttacgcatttgagtcgcagatgcgaccggaaagcgcgtcgcttatctgcgatttgccgccgaaagtcgaacagccggcggcgcgcaaagccgcgaaccagtttgatgcgccgatctctatttatgaagtgcacctcggttcctggcgccgccataccgacaataacttctggcttagctaccgcgaactggcagaccaactggtgccatatgcaaaatggatgggtttcacccacctcgaactgctgccggtgaacgaacacccgttcgacggtagctggggctaccagccgaccggcctctacgcgccgacacgccgcttcggcacccgtgaagatttccgctatttcatcgatgccgcccacgccgcaggccttaacgtgatactcgattgggttccgggtcatttcccggcggatgattttgcgctggcctcatttgacggcacctcgctgtatgaacacagcgatccgcgcgaaggttatcaccaggactggaatacccttatctataactacggccgccgcgaagtcagcaattacctggtgggtaacgcgctgtactggatcgagcgcttcggcattgatgcgctgcgcgtcgacgcggtggcgtcaatgatctaccgcgactatagccgtaaagcgggcgagtggatccccaacgaatacggcgggcgggaaaatcttgaagcgatcgagtttctgcgtaacaccaaccgtatcctcggcgagcaaacgccaggcgcggtaacgatggcggaagagtccaccgattttgccggcgtgacgcgcccgcccgccgacggcggcctcggcttctggttcaaatggaatctcggctggatgcacgacacgctggactatatgaagctcgatcctgtccatcgtcgctaccatcacgacaaaatgaccttcggcatgctctacaactacaccgagaacttcgtgctgccgctctcccacgatgaagtggtgcacggcaaaaaatcgattctcgaccgcatgccgggggacgcatggcagcgctttgccaacctgcgcgcctattatggctggctgttcgccttcccgggcaaaaagctgctatttatgggcaatgaatttgcccagggccgcgagtggaaccacgacgccagtctcgactggcatctgctggagggcggcgacaactggcaccacggcgtccagcgactggtgcgcgacctgaatcatacctaccgccaccataaagcgctgcatgaacttgatttcgatccctacggcttcgaatggctggtggtcgacgatcatgagcgttcggtatttatctttgtgcgccgcgataaagccggcaatgagattatcgtcgccagcaactttaccccggtgccgcggcacaactaccgtttcggcatcaaccagccgggacgctggcgcgaagaattgaataccgactcgatgcattatcacggcagtaacgccggaaatggcggcgtggttgagagcgagcccgtcgccagccatggccgtcagcattcgttgtcgattaccctgccgccgttggcgaccatctggctggtacgggaggcctgatgacgacgcttgccgcgggaaaatcgacgcctttgggcgccagctatgacggcaaaggggtgaacttcaccctgttttccgcccacgccgagcgggtggagctctgcgtgttcgaccagcagggcaatgagcggcgctacgacctcccggcgcgcagcggcgacatctggcacggctggctggccgatgcgcgtccggggctacgctacggttatcgggtgcacgggccgtgggatccggcgcaggggcatcgcttcaatccggccaagctgctgctcgacccttgcgcgcatcaggtggcgggcgaactgctggacgacgagcgtctgcatggcggtatgtatgagccggatgcccgcgatagcgcagctattgcgccaaaatcccaggtggtcgatctgcattacgactggctcggtgataaaccgccgcgcacgccttggagcgaaacggtcatttatgaagcccacgtcaaagggttgacctggctgcatccggagctgccggaggccatccgcggcacctatcaggcgctgggccacccgctgatgatcgattattttcgccgtctgggtattaccgcgctggagctgatgccggtggcgcagttcgccagcgaaccccgcctgcagcggatggggctgagcaactactggggctacaacccgctggcgctgtttgcgctggagccgcgctacgccagccagccgcagcgggcgctcgatgagttccgcgatgcggtgaaggcgctgcacgcggcgggcatcgaggtgatcctcgatatcgtgctgaaccatagtgcggaaatcgatcttgaagggccgacagtctccctgcgcggtatcgataaccgcagctattattggatcagggacgacggcgattatcacaactggaccggctgcggtaacacgctcaacctcagtcatcccggcgtggtggagtatgccctgcagtgcctgcgcttttgggttgatgaatgccacgttgacggttttcgcttcgacctggcgtcggtgatggggcgcacaccggaatttcgtcaggacgcgccgctgtttgaggccattcgccgcgacccggtattgtcggcgctcaagctgattgctgaaccctgggatattggccagggcggttatcaggtggggaacttcccaccgctgtttgccgaatggaacgaccattttcgcgataccgcgcgccgtttctggctgcaacaaaacgtgtcgttgggtgacttcgctcagcgcttcgccgcctccagcgatctctttgcccgcgatggcaagcggcctgcggcgacgatcaatctgatcacggcgcatgatggattcaccctacgtgattgtgtctgtttcaatcagaaacacaatcaggcgaacggcgaagagaatcgcgatgggactaacaataactacagcaacaatcatggtatagagggattagaagccaatcttgccgtgattgagcggcggcgcgatagcgtacatgcgctcttgaccacgctgctgctgtcgcaaggaacgccgatgctgctggcgggcgatgagcatggccatagccagcacggcaacaataatgcgtactgtcaggacaatgctttgacctggctggactggcggcgggcaaatcacgggttaaccgcttttgtcgccgcgcttatccacctgcgtcggcgcattccggcgttaacccgtaatcagtggtggcaggaacaggacggcaacgtgagctggcttaatcagcgcggagaaccgttaaacgccgacgagtggcaacatggcgccgcacgactgcaaatcctgttatccgatcgctggttgatcgcgctgaatgccaccgctgaggtggcggatatggttttacccgcgggggagtggcgcgccgttcctccattcgccggagaggataatccggtcatcatggctgtctggcatgggcccgcgcacggagtttgcgtatttcaaaggtcatagtccctgggggttttcggcgcgttcatgatgaatgggccgtgaagcaggggaatcaaaaggagttaatcatggttgggctagaaaagaacgatccgttgatgctggcgcgtcaacttcctctcaaatcggtggcgctgatccttgctggcgggcgtggtacccggcttaaggatttaaccattaagcgcgcgaagcctgccgtccactttggcggtaagttccgtattatcgacttcgcgttatctaactgtcttaactcaggtattcgccgcatcggcgtgattacccagtatcaatcacacactctggtgcagcatatccagcgcggctggtctttcttcagcgaagagatgaatgagttcgtcgatctgctgccggcgcagcagcgcgtacacggtgagaactggtatcgcggtacggccgacgcggtgacgcagaacctcgacattattcgtcgctataaagccgaatatgtggtgatcctcgccggcgaccacatctacaaacaagattactcgcgcatgctgatcgaccatgtcgaaaaaggcgcgcgctgcaccgtcgcctgtatgccggtgcccatcgaagaagcatccgcttttggcgtgatggcggttgacgaaagcgagaagattatcgagttcgtcgagaaaccggccaacccgccggcgatgccaaacgacgccacccgctcgcttgccagtatgggcatctatgtctttgatgcggattacctttatgaactgctggccgccgacgatctcgacgaaaactccagccacgacttcggcaaagatatcatcccgaaaattaccgaagctggcatggcttatgcacatcctttcccgctctcctgcgtgcaatccgacccacaagccgagccatactggcgtgatgtcgggacgctggaagcctactggaaggccaacctcgacctggcctcggtgacgccggagctggatatgtacgaccagcactggcctatccgtactcatatggaatcgctgccgccggcgaagttcgtccaggaccgctccggcagccacggcatgacgctgaactcgctggtttccggcggttgcattatctcgggctcggtggtggtgcagtcggtgctgttcccgcgagtgcgggtgaattcgttttgtaacattgattcggcagtcttattgccggatgtctgggtcgggcgctcgtgccgcctgcgccgctgcgtgatagatcgcgcctgcgtcatcccggaagggatggtcattggggagaatgcggaagaagatgccagccgcttctatcgttcagaagaagggatcgtgctggttacgcgcgacatgctgcggaaactggggcacaaacaggagcgataatgcaggttttacacgtatgttcagagatgttcccgttgttaaaaaccggcggtctggctgacgttatcggcgcgctgccggcggcgcagatcgcagacggcgtggatacccgcgtgctgctgccggggtatccggatattcgccgtgggattaccgacgcgcaggttgttacccgccgggatacctttgccgggcgcatcaccctgctgttcggccattttaacggcgtcggtatctatctgatcgacgcgccgcatctctacgatcgcccagggagcccgtatcacgacgccaacatgaacgcctataccgataacgtgctgcgctttgcgctgctcggctgggtgggtagcgaaatggcctgcggactggatccattctggcgcccggaggtggtacatgcccatgactggcacgcgggcctgacgccggcctatctggcggcgcgcgggcgtccggcgaaatcggtgtttacggtgcacaatctcgcctaccagggaatgttttactcctggcatatgaatgagatagagctgccgtggtcgttctataacatgcacggcctcgaatttaacggtcagatctcgttcctcaaagccgggctgtactatgccgaccatatcacggcggtgagtccaacctacgcgcgggaaatcaccgaaccgcaatatgcctacggcatggaagggttgctgcgtcagcgccaacacgagggccgcttgtccggcatccttaacggcgtcgatgatagtatctggaatccgcaaagcgatctgctgctggcggcgcgctatgaccgtgatagcctggaagagaaagccgagaataaacggcagctgcaaatcgccatggggctgaaggtggatgacaaagcgccgctgttcgccgtggtgagccgcctgaccagccaaaaagggctggatctggtgctggaggcgctgccgggcctgctggagcagggcgggcaactggcgctgctgggcgccggcgatccggtcctgcaggagggcttcctcgccgccgccgccgaacatccgggccaggtcggcgtgcagattggctatcacgaggcgttttcgcaccgcatcatgggcggcgccgatgtgattctggttcccagccgctttgaaccgtgcggcctgactcagctgtatggcctgaaatacggcactctgccgctggtgcgccgcaccggcggtctcgccgataccgtggccgactgttcgctggaaaacctcgccgacggcgtcgccagcggctttgtctttgaggacagtaacgcggtgtcgttgctgcgggccatccggcgcacctttgtgttgtggtcgcggccgtcgctgtggcgctacgttcagcgtcaggcgatgaatatggactttagctggcaggtggcggcgaaatcctatcgtgaactctatcaacgcttgatgtaaccacaggagctatggctatgaatgcaccctttagttatgcatcacccacgctgagcgttgaggcgttaaagcattctatcgcgtataagctgatgtttatcatcggcaaagatccggcgatcgccaacaaacacgaatggctgaacgccactctgttcgccgttcgcgaccgcatggtcgagcgctggctgcgttcaaaccgcgcccagctgtcgcaggaagtgcggcaggtttactatctgtcgatggagtttttgattggccgtactctctctaatgcgctgttgtcgttagggatttatgaagatgtgaataatgcgctggccgatatggggctcgatctggaagagcttattgatgaagaaaacgaccccgggttaggcaacggcggtttagggcgcctggccgcctgcttcctcgattctctggcgacgttgggcctgccgggccgcggctacggtatccgctacgactatgggatgttcaagcagaacatcgtcgacgggcggcagaaagagtcgccggattactggctggagtacggcaacccgtgggagttcgaacgccacaatacgcgctataaagtgcgtttcggcggccgcgtgcagcaggaagggaaaaatacccgctggatagagaccgaagagattatcgccgaagcctacgatcagattatccccggtttcgataccgatgcgaccaacaccctgcgtctgtggagcgcgcaggccagtagcgaaatcaacctcggtaaattcaaccagggcgactacttcgcggcggtggaagataagaaccactccgagaacgtttcgcgggtgctgtacccggatgactccacctattccgggcgcgagctgcggctgcgtcaggagtatttcctggtctcggcgacggtacaggatatcctcagccgccactaccagctgcaccgcacctacgacaatctggcggcgaaaatcgccattcacctcaatgacactcatccggtgctctcaatccctgagctgatgcgtctgctgatcgatgagcacaaatttagctgggatgaagccttcgaggtgacctgtcaggtcttctcctataccaaccatacgttgatgagcgaagcgctggagacctggccggtcgatatgctggggaaaatcctgccgcgccatctgcagattattttcgagattaacgattacttcctcaagacgctgcaggagcagtatcccaacgatactgcgctgctcagccgtacctcgatcattgatgaatccaatggtcgccgggtgcgcatggcgtggctggcggttgtcgtcagccataaagtcaacggcgtgtcagagctgcattctcgcttaatggtcgagtcgctgtttgccgagtttgcgaaaattttcccgatgcgctttaccaacgtcaccaacggcgtcacgccgcggcgctggctggcgttggcgaacccgccgctgtcgcaggtgctggatgagaatatcggccgcacctggcgcaccgacttaagccagttgagcgatctgctgcagcatattgattacccgacggtgaaccaggcggtgcgccgcgccaagcttgagaataagcagcggctggcgaactatgtcgcccagcagttgaacgtggtggtcaatcccagggcgctgtttgatgtacagattaaacgcatccacgaatataaacgtcagctgatgaatatcctgcacgtcatcacccgctacaaccggatcaaggccgatccacaggcggagtgggtgccgcgggtgaatatcttcgccggtaaggccgcgtcggcctactatatggcgaaacatattattcatctgatcaacgatgtggcggcggtggtgaacaacgatccgcagattggcgataagctgaaagtggtgtttatccccaactacagcgtgagcctggcgcagctgattatcccggcggcagatctctccgagcagatctcgctggcgggaacggaagcgtccggtaccagtaatatgaagtttgcgctcaacggcgcactgaccattggtacgctggatggcgctaacgtcgagatgctggagcatgtcggcaaggacaatatctttatcttcggtaataccgcggaacaggtggaagccctgcgcagcaacggctataaaccgcgcgactattatgagcaggatgaggagctgcatcaggcgttgacgcagattggcaccggcctgttcagcccgtcggagcctggccgctaccgcgacctgctggattcgctgatcaactttggcgaccactatcaggtactggcggactaccgcagctacgttgattgccaggataaggtggacgagctgtaccgccatccggaggagtgggccaataaagcgatgatgaacatcgccaatatgggctatttctcatccgaccgcacgatccaggagtacgccaaacatatctggcatatcgacccggttcgtttgtaatcggttaagcatcagtaaaacggggccagttggccccgtttttgtgtgtgcggtgatgtacccgggccaggcgtcagccgccgcccggggtatatcaggacgctaacgacagttcagactttcccgtgtgttgcgccagccactcgctgatacgcgcctgctgctcggcattcagccacatcccctgtttggttcggcgccagatagcgtcatccaggctgcgaacccactcgtgttcgaccaggtacttcagctcggcttcataaaactcgtggccaaaatcttctcccagatcggcaagcgaagtcgcttcgccaaggatccactcgctgttgctaccgtaggtgcgggcatagtgacgggccattgattcgctgataaacgcgaagcgacggcgcagtttcgccgcgtagtcgtcgcggtcgccgccgatatcgccgccgggcagaacggcggttttggtccacgccgggccaatcccctgataatacggggtcagtttttccagcgcatgttccgccagcttacggtaggtggtgagcttgccgccgaataccgacagcagaggcgcctggccgttctcatcgtgaatatcaagcgtatagtcgcgggtaatcgcctgcggtgagtcggattcatcgtcgcacagcggacgcacgccggagtaagtccagacgatatcgtcgcgcgacagcgtctttttaaagtgcgcgttgtagacgttcagcaggtagttgatctctttatcatcgatcgccacctctttcggatcgccgttgtactcgacgtcggtggtgccgataatcgagaattcatccatccacgggatgacaaacacgatacgtttatcttcattttgcaggatataggcctgcttctgggtgtgcacgcgcggcaccacgatatggctgcctttgatcaggcggatgccatatggcgagcgtagatgcatgccttcgtcgaagaaatgtttcacccacgggccggtggcgttaaccagaccgcgcgcgtgccaggtgaatttttcgccgctatcgatatcttccgcttctaccacccacagaccgttttcgcgttttgccgagatagcgcgggtgcgggtgcgaacctcgccgcctttacgtaccaccatctgggcgttagcaagaaccagacgcgcatcgtcgacccagcagtcggaatattcgaaaccgcgcacgatttccggcttaagtaccgattccgcgccaaagcgcaaaccggtcgagcccggcaggctggtgcgtttgccgaggtgatcgtataaaaacagaccgatacgaatcatccacgccgggcgcagatgcgggcgatgcggtaagcgaaagcgcatcgggaaggccaaatgcggcgccatttttaataacacctcgcgctccgccagcgcttcgctgaccaggcggaattcgtagtgttccagatagcgcaggccgccgtgaatcagtttcgagctggcgcttgaggtggcgcaggcaaggtctctcgcttccagcatcagcacggataaaccgcgcccggcggcgtctgccgcgataccggcaccgttgatgcctccgcctatcacaatcagatctttgatttccacgctcgcacctcgtttactttcgtttaagctcataaatgttcgatatcgctcactatagcaaacaaacgcgcttttggtaacatcaaaaaaacatttcagagtgatgcatgtaacatattggcgtttatttaccgcctgacggtacactagcgggtaaaatcagggtcggtcaccgcccgtcatgaagtgcaatagagaagagagccatggaacaatttgaatgtatcaatgtagaagaagcgcatcagaaactgcatcagcagaaggcggtgctggtcgatatccgcgacccgcaaagctatgccatggggcacacgccgggcgcgtttcatctgaccaacgataccctgggcgctttcatgcgcgataacgactttgagacgccggtgatggtgatgtgctaccacggcaacagcagcaaaggtgccgcgcagtatttactgcagcagggcttcgagaacgtctacagcgtcgacggcggttttgacgcctggcatcgtcatttcccggcggaagttgcgcacggctcgctataagcgcggtacggtatatactagccccctttgtgtggaataagcgatccgctgtatgttaatgattacctcttttgccaacccgcgcgtggcccaggcgtttgtcgactatatggcgacgcagggggtcatcctgactatccaacagcacacgcagagcgatgtctggctggctgatgaaagccaggccgcgcgggtgcaggccgagctggcccgttttcttgaaaacccggccgacccgcgctatctcgccgccagctggcaatcggggcataccaatagcggattgcattatcaacgcttcccgtttttagctaccttgcgtaacaacgccgggccgtttacgtgggcgattttgctggcctgtatcctggtcttcatactgcaaaacgttctgggcgatcagacgatgatgatctggcttgcctggccctacgatccttcgctgaaattcgaagcctggcgctatcttacccatgctttcatgcacttctcgctgatgcatattctgtttaacctgctatggtggtggtacctcggcggtgcggtggagaagcgcatcggtagcggcaaactggtggtgattaccattatcagcgctctgctgagcggattcgtccagcatcaggttagcggcccgtggttcggcggtttgtcgggagtggtctatgcattaatgggctatgtctggctgcgcggcgagcgcgacccgcagagcggtatttatctgcaacgcggtctgatcctcttctctttagtgtggttagtggctggatggtttgatgttttcggcatgtcgatcgccaatggcgcgcacgtggcgggcctggcagtcgggctggcaatggcgtttgtcgatacgctaaatgtgcgaaaacgaacgtagagattcccagggatatttcatgaaacaaacacaacgtcatgacgcgattatcgagctggtaaaaaaacagggatacgtcagtaccgaagagctggtggagcagtttgccgtcagcccgcagactattcgtcgcgacctgaatgatttagcggaacaaaaaatgatcctgcgccaccacggcggcgcggcgatgccttcaagctcggtcaacacttcgtggcacgacaggaaagcgacccagacggcggaaaaagagcgtatcgcgcggaaagtggcgagcgaaatacccgacggcgcaaccctgtttatcgatatcggcacgacgccggaagcggtggcccatgcgttgctcgatcataatgacctgcggattgtgaccaacaatctcaacgtcgctaatacgctgatggtgaaagatgattttcgcattatccttgccggcggcgaactacgcagccgcgatggcgggatcatcggcgaagcgacgctcgattttatctcccagttccgcctcgacttcggcattctcggtattagcggtattgatagcgacggttcgctgctggagtttgattaccatgaagtgcgcaccaagcgggcgattatcgaaaactcgcgccacgtgatgctggtggtggatcactcgaagtttggccggaatgcgatggtgaacatgggcagcattagtatggtcgatgcggtttataccgatatcatgccgcccgcaggcgtgctgaaggtgattaaagacaataacctgcagcttgagctgtgctaaacggcgttataccccgtatcccatcattttgagcaaccgctgggcatgctgaacggcatcctggcggtgcgcgacgcccagtttctgatacagattgcgaatgtgcgttttaatcgtggtggccgcgacatccagttcgccggcgatctgctcgttgctgtaaccggaatagataagccctaacacctgccactcgcgctgggtcagcggactggtgcggataagctccggcacttccgggtggttcagcagccgttcaacgaagctctcgtcgaagtgggcgaatttatgtcgatgatgctggttaatatcgcgcaggatgcgctgcgcgcggtgctgttccagctccggcagcgtattcagttgaatcagctgacgcagctgctgggccatggcttcgccttcaatcacgaagtggttaatgaagccggtgcggttagccagggttaaggcttctattaacactttttgcgcctcacccttgcgctccgcctgccagtacagctggttcaacagcagcaggttacggttgatatcgctcatcagccgcagcgaacgggcattttcatttaactcttccagtaccatttcggcggaatcaaaatcaccgagcaggatctgcgcacgggcaatgttgcgccactggctttgcaggaagtggttattggcgaattcaggtttcggcgtctggcgcagccagttggccgctgcggttttatcgccggtcatctgccagtagatcacccgcactttatcggcgttagagacccaatcgctgtgatagtggccgttgcccagcagattttccagacggtttaataagctgcgtgcgttgtcgagatcgccgcgcgccagcgagcactgcaccatcaacgccaggcactgcaactgctgctgcggctggtagtttgccagtaccgcgatgccgctgcgggcgctttcttcagcttcatcaagacgcgcccatgcccacagcagctgcgcgcggatgcgcaacaggaactcatgcatcggcaactgttcaagatgctgatcgcggataagctggaaagctttatcctgaatctcccatgccgcctgcaggaagccctgggcaaacagaatctcgctctgctgaatcatgctccacagggcgtagtgccagacgtcatgacgacgagccatctgttctgtttgctgcatcaccgccagcgatttactcaagtggcctttgcagtgcagcacttcgccatggacggaagtggcgacgatgcggctgtaatagctcgccagcggcagttcatccagcgccaccattgccagacgctcggcttcgtcctgatcgccggcgttgatagcgacctgcgcgcgcagggcgttgaaatcgccgtgcatcgcggtatccatttcgacattcatctcctgctcggcgcgggccagcagggtattcacttcgctatagcgatgctggctctgcatcagccaggcctggagcaggatcagccgcgggttttccagcaggttcgaccacggcagcgccgccagcgattgttccagcagacccaactcgctatggttgaacatgccccaggcgtggttgagcaaaatatcgcgcagcatggcggcatcgccggcggcaagcgcatgatggatagcttcggtggggaacccctgcgccatccacgcttcggcggcggcgcggtgaatttccggtagctcggtggccatttcccactgacagcgctggcgcaggaagttgccgaacagagggtgatagcggaaccactcgccggagtcatccatccggtgcaggaacagcccctgacgttcgatctcttccagttgcatctggccgttctcttcgccggtgacgcggacgataagcgcgtcattcatcgagcgtagcagagagctttttaacaagaagctgcgggtacgggcatcgacgttatccagcacttcatcgaccagatagtcggaaaggtggctggcgttaatcccggcgagacgacgggctgagtgctgggcggaggtatttttctgccgggcggagagggcgatgagctgcagggtggtggcgatacgctgcgcgccgccgcagtccgccagcattttaccgagcatagcgccgaagcccatgatcagtgcgaggctgccgagcgtgccccgacgccgtttttgatggatacgatgactttatccagaggcataccctgcattaatccgacggcgagcgccaccagaaccagagcgatgaagccgttcattttgaaacggatcatcagcaacaataacagggcaaccccgatagctacgatgactaatggcatgatttacctggccttaacttgttatgggtaacgttaaagtctgaacatctacagtatccgttccgcagaggaacaaggatgtcttgcaccgtaaagctggcttattcctgacccagagaaaggatagctggctatttttttgtcggtggtgcttgctgtggatgatacgggtaacatgtgagctttgagaatgccctgcgcggggtaaattttaaatatgagacttaagtcatactctctgccgggtttttgccgtgcgggctagtcagaaatgttgtgcggtaacatgctggagggagaagtcacccggcaaacggactgtcaccgggcgaggggcggacgcttagtagtaggagtgctcgccgcgctggtgttcggtcagatcgcgcacgcctttcagttccgggaattcgttcagcagctgcttttcaatcccttctttcagggtcacgtcgaccatcgaacagccgttgcaaccgccgccgaactgcaggatagccagaccgtcttcggtgatttccatcagcgaaacgcgaccgccgtgaccggcaagctgtgggttgatctgcgactgcagcagatactctacgcgctccatcagcggggcatcgtcagaaaccttacgcattttggcgttcggcgctttcagcgtcagctgggaaccgagttggtcagtgacgaagtcgatttcagcatcttccagataaggcgcgctgagttcatcaacatacgcggtcagctgttcaaatttcagcgccgtgtcggtgtcttccaccgcatccggtgggcaataggatacgccgcactcagcgtttggggtgccgggattaatcacaaatacgcgaatttgcgtcccttcttcctgatttgccagcagtttggcaaagtgcgcttgtgcagcatcggaaatacggatcatagcgttggcctaatagttgactattttactgggttataatacgcccatcagcggggtctacaaggtacggcacaaacaccatacctgaaccgtcgcggcgccgtttcgcaaaagcaggcgtgaaatctcggcgacggtgcttccggttgtgacgacatcatccacaatggcgatatggtggccccgaacggataattcaacctggaaagcatttttcaggttctgcttacgtaatctggcgcttaactgatgctgcgttgcggtacgccgggttcgcttcagcgcatcgccgcgccaggcgcagcctacccagcgcgccagtgggcgacatagcgcctcgctttggttaaatccccgacgccaatggcggcgctgccagagaggtacgctgacaatccgatccactggcggcagcccgcaagtaagacgcaggcgtaaaagaagcagccgcgccaacgcgatcgccagttccggatgaggggcgaacttaaactgatgcaccaacccgcttagcggtggggtatagctattcaccgtcaccagccgctgccagggcggcggttttttcaggcagcgtccacaggagatggcgggcgccaatgcgggtaaaccgcactgtgggcagagcgatggcgtggcgagcagcgaggcggtgcagcgtgagcacatccccagtgagcgatggccagcggcatttggcatagccagcataagctgtgtgctgttagcataattcccctcatagtgatggaaagagaacagtaactgatgaatgacatctggtggcaaaccacgggcgaaggaaattgtcatcttgtgctgctgcacggctggggctgaatgccaacgtatgggattgcatcacgccggaactggctacgcattttaccctgcatctggtggatctaccgggctatggccgcagcggtggttttggcgccttaacgcttgaagagatggcgcagcaggtcgttgaaaaagcgccggagcaggccatctggcttggctggagcctgggcgggttggttgcgagcctggtggcgctgcagcacccgcaacgcgtgcaggcgctggtgaccgtcgcttcttcgccgtgttttggcgcgcgcgaccagtggccgggcattaaaccggaagtgctgagcggcttccagcaacagctgagtgaagatttccagcgtaccgtcgagcgttttctcgccctgcaaaccatgggcaccgaaagcgcgcgccaggacgctcgcacgctgaaaagcaccgttctgtcgctgccgatgccgcctgctgaggttctcaatggcgggctggagatcctcaaaaccgccgatttgcgccaaccactcgccgcgctgaccacgccgtttttgcgcctctatggtcgcctggatgggctggtaccgcgtaaaatcgttcccttgttggatgagatgtggccgcaaagtgagtctatcatcttcgaaaaggcggcccatgcgccgtttatttcacatccacaggcattttgtgagcctctcatcgcgctgaaaaaccggctgaataattatttttagcgccgcgtggtaaatcatcaggatcgggcaatacttaggttgttgcggtggttgattatttcgtttttgccgccgcaaactaaaaataacaaccttatggagagtaaaggctatgaaacttgttacaggtattgttgcatctctggtgataggctccctctcttttggcgcgttcgcggcgaaagagatccagaaagatgaagtcgcgaagatgaatctgaccaaggtcggtagcatcacgacttcccgtaccacgtcgccgatggacgcgaagcgcgatctgtcgaagaaagcggatgagttgggtggtaagtacttcgtggtgattgccggcgagaagaacgagaagacggttcacgcgaacgccgacgtttataagtaagcctgattttccctgccagcgctgcgcctggcagggctagcaaatcgcaccgcgggtagcccggataaggcgcaacgcgccgccatccgggatgtcttattcagcgcaaagaccaccactcccgcaggcaggctttaccctccgggcagcttttacagctgccggaaaggcagccatcggcatcttcggtctttctgactactttccccatcgcctccaggcggcttaatatggcgtcgatcagcggccgtggcgtatgcaggcggacgctcaactgtgcggcttccattcgcccctgcagggccagcatatcgcgaacgtcaattaacgatgccatgatgattgctccttagtggcagtcgccggtcgggctctggcagcaggaggttggggttttacgtgtcgccagcagggaaacatccacccggctacgcgcccgacgcaacaggccaaagaccaccacgttaaacagaattaccgccagaatacacaccaggctgtagcgcgggtgttggctaaagctcacggtctggtagtacagcgtcgatagcgagtaggcgatattaagcccccacagcaccgagaacatcatccaaccgcggctggactcacgggcaatcgcccccatcacggaaatgcatggtatatagagcaggacgaagatcaggtagctgtacgcggcggcggcgctgccgaatttactgcccatcacgcccatggcgccagtttccatttcgccatcgcctttacttgcttcaatcgggttcgccagcacgctcaggctaaaggtgtctttcagcccctgccaggtttcatcgacggcggctaacagctcgtcgccaaggctaaactcctgcggattgaaagcttcattctggatatcttccgcggtgtagagggtgttcagcgtaccgaccaccacttctttcgccatcgcgccggtaaacaggccgacggttgcttgccagttatcttcgtgcacgccaatgggcttaaacaccggggtaatgacccggctcaccgaagccagcgccgagtcgttgatgttatcgaccactttgccgctgagcgagaagctgttcagcgcgctgaggaaaatactgacgatgacgatgaccttaccggcgcgcaggacgaagcctttcaggcgctgccaggtctggataaccaggctcttgatgtgcggtacgtgatacaccggcagctccatcacgaacggcgaggcttcaccgcgcataatggtgtatttgagcatcaggccggtgaggatcgccatcacgatgcccagtacgtacagtgagaaaaccgccagcgcgccgttctggccgaagaaggcggcggcaaagaccgcgaaaatcgccagtcgcgcgccgcaggacataaacggcgccatcataatggtcatcagccgttcacgcggcgcatccagcgtacgggcgcccataacggaaggtacgttacagccgaaaccaacgatcagcggcacgaaggatttccccggcaggcctaacgcctgcatcaggcggtccattacgaaggccgcgcgcgccatatacccggagtcctcaaggaaagagaggaacagatacatcatgccgatttgcggcaccagcggcagtacggtattgataccaccgcccagcccttgcgcgaggaacacggtcagccagtccgggaagtgcagggtgtagcccagccactggatgccatgaatgaagacagccaccgagccggcgtcgaaaatcggctgcagggcgccgccgatgttgatagccagcaggaacatcaggtacatcacgaacaggaagatcggtaagccgaggaagcggttaaggataattttatccatcgccgtcgtgaagcggctcggctcggcggtcagggtgttactgacggcatcgcataccgcggcgatgctttgatagcgggcatcggcgatatagagcgccggatcgtccatctcgccgctcaggttggccagcgccagatccagtttgtcggcggcgttgccggcaaaggcgcggctataaatatcgccttccagcatctgcagccccagccagcggcgctgacgcagcggcatatcagcaggcatcgcctgtgccagcatatcggcttcgcgctgcagagattgcggataatgcaccagttccagcggctgattttgctcatggcggtcaagcgccattttcagcgcttcaataccgcggccgcgggtggagaccagcgggatgaccgggcagccgagacgggccgccagcgcgtcgacgtcgatgcggatttgctgtttttcggcaatatcgagcatgtttagcgcgacgacgcagggaatacccaactccagcagctgcagagtcagatagaggttacgttccaggttcgaggcgtcgataacgttaatcagcaggtcggcatcgccgctgagaatgtagtgacaggcaatttgttcatcgagcgatgtttgcgaggagatggtggtcagcgaataggtgcccggcaggtcaaccagggtaacctggtggtcggtggtggtgaaggcgccttctttacgctcaacggtgacccccgaccagttacccacccgctggcgcgcgccggttagctgattaaataacgttgttttgccggaattaggattaccaattaaaccaacggttaattttttcatttttcagactcttagtgccgggtcaggtgttattgcgcaaccgcttccagttcaattaacgcgaggtcttttttacgtaataccaagctcacgcgccgggtctcaatatgaataggatcgcccaacggcgccacgcgcacgacatgaaacgaagagccgggcaacattcccagggagagcagtttctgccgataagccgggctaatatcgcgggaaaaaccggtgattttccacgaactatcaggagtgaattgcatagggcctacttgttatcgctaaccgaaaagagaatatccatgcgcggctattaaagcggcgctggggactatagccaacgaagaagaataaaacgtcattgataacgatgataatgagaatggtttgtatcatcaatacatggcatggataataaatgcgtttttcatgggtatttgcttattttttgatatgacgcaagaaccctgttgtagccaaaaataagtcaaaaattaatttattcacttaatgtttaataaaggtttcattagttaacagaatgaaactttataaatttcgaacttattgaaaggttactggaatatattaatcgaggctcaggcattaaaaagcggaaaattgcccctcgaagaggggcagggaaggattagcgttttttgcccatcgcggccgccagcgcatccatcatcgcgctgttgccggctggttgagcatcgcgaccgcgcggcttcgtcgctttggccgccggtcggttgccctgcgggcggtcgttgccgccgccgcggcgcgcgttgctgtcgcccggctgttcatccaggcgcatcgttaacgcgatgcgtttacgcgccaggtccacttccatcaccttcactttgacgatgtcgcccgctttgaccacggtatgcgggtcttcaacgaatttattcgacagtgaagagatatggaccaggccatcctggtgcacgccgatatcgacgaaggcgccaaagttggtgacgttggtgaccgcgccttccagaatcatccccggcagcaggtcgttcatcgtctcaacgccgtcggcgaactgagcggttttaaactcagggcgcggatcgcggcccggtttttccagctctttgatgatatcggataccgtcggcacgccgaacttatcatcggtaaaatcagaggctttcaggttgcgcagctcgctgctgttgcccatcagatctttcagcgcctgctgggtagcggccagaatacgctcgactaccgggtaggcttccgggtgaacggtcgaggcgtccagcgggttgtcgccgtggttaatacgcaggaagcctgcgcactgttcaaaggcttttggccccagacggctaaccttcagcaattgctggcggttgtggaactggccgttctcgtcgcgccaggcgacgatattctgcgccatcatgcgggtcaggcccgcgacgcgggtcaacagcgccaccgaggcggtgttaaggtcgacgccaacggcgtttacgcagtcttccaccaccgcatccagcttacgcgccagctgcgtctggctaacgtcatgctgatactggccgacgccgattgatttcggatcgattttcaccagctcggccagcggatcctgcagacggcgggcgatagagaccgcaccgcgtagggaaacatcgaggtccgggaactcctgcgccgccagttcggaagccgagtagaccgatgcgccggcttcgctgacgatcaccttctgggcggtcactttcgggaactgtttttgcacgtcgaggaagaaacgctcggtctcgcgggaagcggtaccgttgccgatagccaccagctcaacgttatgtttttcgcacagcgccgccacgacgacggcggctttagccgcctggccggtatgcgggtagatggtatcggtggccaccagtttcccggtgccatccactaccgccactttgacgccggtacgcaggcccggatcgaggcccatggtggcgcgcaggccggcaggcgcggccatcagcagatcatggaggttacgggcgaatacgttaatcgcttcgtcttccgcgcgttcgcgcacggtgcccattaattcggtttcgaggtgcatcagcaccttgatgcgccaggtccagctgacgacgcctttgcgccagctatccgccggggcgttattcaggcgcaggccgagatgatcgataatgatctgttcgcagtggctctctttcggcggctcatcaaactgcgggtcggcgttgagcgacagctgcagcacgccctcattgcgcccgcggaacatcgccagcgcgcggtgcgacggcacggaagcgatcggttcatggtggtcgaagtaatcgcggaatttagcgccttcttcttccttgccgctgacgacgctggccaccagatgggcgtttttccacagataatcacgtactttcgccagcagggcggcgtcttccgcgaagcgttccatcaggatatagcgcgcgccgtcgagagcggctttgctatccgccacgcctttatcggcatcgatatagtttgccgcttcggtttccggatcgtgggaaggctcattccacagcagatcggccagcggttcgagaccggcttcaatggcgatttgcccgcgggtgcggcgtttgggtttgtacggcaggtagagatcttcgagctcggttttgctgagggtggcgttgatggctttttccagcgcttcgctgagcttgccctgttcgccgatcgatttgaggatcgcctggcgacgatcttccagttcgcgcagatacccgaggcgagtttccagattacgcagctgcgtgtcatccagaccgccggtgacttccttacgataacgtgcaataaacggcacggtgttcccttcatcaagcaggcgaacggcagcttctacctgttcggctctggcctgaagttcacccgcaataatgcggcagagcgaatcattcatcatcggttttattcatcattagggtcaaaatcaggggatagttatacggggtgacaggataaaatgccagccgcgaccgggttctctcggaatgttccggcgctatttcacgtattcaatttcattgacgtaccagctggcttcgcccgcaggagtgttaacgatagccaggtcgcccacctctttcttcagtaaagcgcgcgccattggcgaatcgatggagatatagtctttgcggccgaagatttcatcgtagccgacaatgcgaaagcgcttggtatcaccatcgtcgttctcaatttccacccacgcgccgaagaagactttgccttcctgctgcggggaataatcgacgattttgagattttccagacacttggtgagataacgcacccggcggtcaatctcgcgcaggcgctttttattgtactgataatcggcgttttcgctgcggtcgccaagactcgccgcccaggtcactttcttggtgacttccgggcgctctgtacgccacaagtaatccatctcttgcttcagtttttcatacccttcacgggtgatcagcggcgttttcatctgtggttcatccaaaataatctcgtcccgccgtaccttaaccagccgtttcggcaaggtaaagcgccaggcgcagaaatcgcggctactggctgcgggtaaaaatggtaatcacctgatcaatatgatttttcattgctttctttgccgcacgtacgtcgtgggcctcaatggcttcaaggatcgcgcgatgctcctgttccgagcgatgcggcatatcgtccggggtgtaatggcgctgcagcatgcggaacatactgccgtagcggtggccgagcaggtggccgatgataaacgcgtacgcagggttgccgctggcctgagcgatacggatatggaacaggcggtcgccgggatgggtggttgaaccggcacggttatcgcgacagttttgctcaaaggcctcgcggatagcggccagctcttcggggctggcgtggcgcgccgccagcgcggcggtttccggttcgattaacaggcgcgcctgcagcagagaaaaaggcggtagttcggcgttaaaatcgaggtctatgttgagttcgtcgtcgatctccgtccactggtcgcgaccggcctgcgccatcaccggctctttggtggcgacgagcggcgtttgcgatttgacgattaccccgttgccgacgcgcacgtccaccaggccaatcacctccaacgcaatcagcgcttcgcgtaccgatgcgcggctgacgttcaattgctgggctaaatctcgctcagacggaagacgactgccgggcggaaattcgttgttctcaattaatcgcttgagttggtctgctatctgtctgtaaatccttgggttttccagtctggtaatcggcatgtttcacctttgctcatgcgatagacagtgataaagcgcacaaatattggccagcacacttgagtgtttgttagtcgagtgtaattaatttgttaaccaatgtgccgtttgtggccgtttttgcaacatctaagcctcacgatagcgggttatgcctgacttgtcatgcgaaaggtcaggcctttgactaccaccaatggcctgaccattagtcctttagaccaggggagagaaatggaactaaccggaaaacgcgttctgattaccgccgcagggcaggggattggcaacagctgcgcgcggctgtttgccgccgctggcgcggaagtgattgccagcgatatcaacattgccggattgagcgatatccccggcgtacagccgctgcagctggatgtcacccgcgcggatgcgattgccgccgccgcggaaacgctgggcccgctggatgtcttgttcaactgcgccggggtggtgcatagcggcagcattcttgaatgtagcgagcgggagtggcagttcgccctcgatctgaatgtcaccgccatgttccacacgattcgtgcctttttgccggcgatgatcgcccgcggcggcggctcgattatcaacatgtcatcggtggcctccagcgtgaaaggtgtaccaaaccgcttcgcctacagcgccagtaaagcggcggtcattggcctgacccgctcggtagcggcggatttcgtcacccagggcattcgctgtaatgcgatttgtccgggaaccgtcgattcaccttccctacgcggacgtattgccgagcaggcgcgcgagcaggggttgagcgaagaggcggtttatgaggcgtttgtcgcccgccagcccattggacgcatcggtaagccggaagagattgcccaactggcgctgtacctggcttcagacgccagtgcttacaccaccggcacggtgcagattattgacggcggttggagcaactaaccgcgcggcgctttatttcactatcaggaaaacgcatgaaattacttcgttttggcaatcccggcagcgagcgtccgggcgtactcgataacgacggtcgcctgcgcgacctatcgcactatattagcgacctgcgcggcgacgcgctgctgccagagagtctggcgcgtctgcgccagctggatctctacagcctgccgctggttgaaggcaatccgcgtataggcgcctgcgttggcggtatcggtaagtttatctgcattggcctgaactatgccgatcacgccgcggagaccggcgccgatattccgcaggaaccggtggtattcagcaagtggaccagcgcggtggtcgggccgaacgacaacgtgattatcccgcgcggttcgcaaaagaccgactgggaagtcgaattaggggtggtgattggcaaaggcgggcgctatatcgacgagcgcgacgccatgcagcacgttgctggctactgcgtgattaatgacgtctccgaacgtgagtatcaaattgagcgcggcggcacctgggataaaggcaaaggctgcgacacgttcgggccgaccggcccctggctggtcaccgccgatgaaatccccgatcccaacgcgcttaacctgtggctggaggtcgacggcaaacgctatcaggacggcaacacccgcaccatgattttcaaagtgccctatatcatcagctacctgagccgctttatgagcctgcagccgggcgacgtcatctccaccggcacgccgccggggtggggatgggccagaaaccgcagccggtttatttacgcgccggccagactattcgtttgggcattgaagggttgggcgaacagcagcagctgaccgtggaggacaaacaatgacgcaaattaccgccctgcgggtagaagatatccgctttcccacctcgcagcagttggacggctctgatgcgatgaatcccgacccggattactccgccgcctacgtgatcctcgaaaccgacaatcctaagctcaccggtcacgggctgaccttcaccattggccgcggcaacgaaatttgctgcgcggcgatacaggcgctggagcatttaatcgtcggcgagcaactcgagacgatcgccgccgatatgggcgccttctggcggcgctttaccagcgatagccagctgcgctggattggcccggacaaaggggcgattcacctggcgaccggcgcggtggtcaatgcggtgtgggatctgtgggcgaaggccgaaggcaaaccggtctggcgactggtcgccgatatgagcccggccgagctggtgcgctgcatcgattttcgctacatcaccgactgcattaccccggaggacgcgctgcgcctgctggaaagccgccaggagggtaaagcccagcgtctcgaacagctacaggcgcagggttatccgtgttacaccacatcagcgggctggctgggttacggtgatgacaaactgcgtcgtctttgtcagcaggcggttgatgccggtttctcgcatatcaagctgaaggtcgggcgcgatattgaagatgacatccgccgcgtgcgcatcgcccgggaagtgattggccccgagcggaaactgatgattgacgccaaccaggtatgggaagtggacgccgccattccgtgggtgaaagcgctggccttcgccaacccgtggtttatcgaagagccgaccagcccggatgatatcgaaggccatcgcaagatccgtgagaatatcggcgcggtgaaggtcgccaccggcgagatgtgccagaaccggattatgttcaaacagttcattatgcgcggcgcgattgacgtggtgcagatcgatgcctgccggttaggcggcgttaacgaagtgctggcggtgatgctgatggcggcgaagtacaacctgccggtttgcccgcacgccggcggcgtcggactgtgcgaatacgtccagcacctgtcgatgattgactacctgtgcatcgccggtacccatgaagggcgggtgattgagtttgtcgaccatctgcacgagcacttcctgcacccttgcgaaatccgcggcgcagcttatatgccgccgcaggcgccgggctactcgattgaaatgcatcaggcttctatcgagcagtaccgctaccgtggagaagcgcatgttgcgcattgacgcccatcaccactactggcgctatcagccacaggattacccgtggattgatgacgacatgccgcaactgcgccgggatttttacccccgcagctccagtctctgctggcgcagcaccggctcgatggtgcggtggtagtgcaggcgcgtcatgacgagaacgaaaccgcctggctggtggaacaggtttctcaaatggtaggcgtacgcggcgtggtgggctggctggatattaccgccgcggatctcgaagacaagctgacgcagtggcgcgaccagctgtgcgggttgcgccatcaggtgcaggatgaagccgacccggcagcgtggcttgagcgcgaggcggtctcccgcggcatgcggcgactacagcaacgcggctatagctgggatctactggttacccatcgtcatctcgcggcggcggcacgctttgccgcccgccacgatgatcactggctggtactcgaccatttcggcaagccggatatcgcgcgcggcgcggcccactgggccgaacaggcgcggccgttggccgcattaccccatgtggtgggcaaactttccggcctggtgaccgaagccgggcgcggatgctggaccgagcagcaactgctgcctttcttcgacgccgcgctggagctgtttggcccgcagcggctgatgtttggttccgactggccggtatgcctgctggcggcggagtaccgccaggtttaccagctgtgcgaaacggcgctggccccgctgacggaaacgcagcggtcagctatctggggcggcactgcctgtcgggtttatggtttaacggaggcgaagcgtggatctatttcttaaagacaaagtggttatcgtcaccggtggcggctcggggatcggcgcggcgataacgcaactgctggcggaagagggggcggtgccggtcatcgtcactaatgcccagccagagcaggggtatttggataggttgaagcaaatcgcgccgcaaagtcagctgattatcgccgacctgtgccaggaggccgaatgcgccggggcggtaggtcaggtgctggcgcgctttggtcgtattgatgcgctggtgaataacgccggagtgaacgatggcgtggggctggaagcaggacgtgaggcgtttcttggatcgcttgagaaaaacctgatccactactatcagatggcccacctgtgccgcgaagcgttagaggaggcgcggggcgctatcgtcaatatcgcctcgaaaaccgcgctcagcggccagggcggcaccagcggctataccgcggcgaaaggggcggtgctggcattaacccgtgaatgggcggtatcgctgcgcgagagcggcgtgcgggtcaacgcggtggtgccggcagaagtgctgacgccgcagtaccagcgctggataaataccttccctgacccgctgcggcagatggcggcgattaaccaacgcatcccgttgggcaaacgcatgaccacgccggaagagatcgccaataccgtggtgtttcttatctccgcgcgcgcgtcgcacactaccgggcagtggctatcggtggatggcgggtatttgcatctcgacagggcgctgtcatgagcgccgcgcggcggctgtgtcaggcgctggatttagtcgattcggcggagaaaatcgccgaataccagcgtctgcatgaacgtatctggccggaagttgccgggcatctgcgcacccatggcgtgctggatatggagatttaccggcttggcacgcggctgtttatggtgatggaggtcgccggggatttcgatggcgaacgctttgctcagcacagcctgaaccacccggtcattcagcgctgggaagcgctgatgtggcaataccaggttcccacccctggacgccggcaggcgaaaaatgggtgtcgatggagcgcatattctctttgcaggatcaataaaacaactctgtactctactgaggatctcaccatgctagtgaataaaacggcggagccgctggcggcccgcgccggggcgacccctaatctgcgctgggcatttatgctggtcaccagcctgttctttatgtggggctctcttacggcctgctcgatgttctcaataaacattttcaggagaccctgcacgtcaccaaagcgcagtccggtttactgcaggcggcctattttggcgcctacttcctggtggcgctgcccgccggctactttatggataaacgcggttataaagcggggatcctggtcggtttgtgcctgtatgcgcttggcgcgttgttgtttgtgccggcggcgagcgtgaatagctttgcgctgttcctgttcgcgctgtttgtgattgcctgcggattaggctgccttgagaccgcggcgaacccttatgcgacggtactcggcgacagtaaaggcgccgaacggcggttgaatctggcgcagtcgtttaacggactggggcagtttattggcccgctgatcggcggcacgctgttcttttcggccactcagggcaataccggcgatcagagctcggtaaaaatcacctatgtcgctatcgccgtgctggtgctggccatcgcgctgcttttccgccgcacgccgatgccggatattcgcgaagaggagggcagtcagcaagaagcggcgcaggggctgtggcagcatcgccactttaccggcggggttatcgcccagttcttttacgttgccgcgcaggtcggcgtggggcgttctttatcaactatgcgaccgaacactggcatggggtgacaaaccagcacgcttcctatctgctgtcgattgcgatgattagctttatgatcggtcgtttcttcagtacctggctgatggggcgggtgcaggctgcgacgctgctgatggtttactcgctggtcaatatcgtgctctgcggtctggtgatgatgagtatcgacggcgtgtcggtggtggcgttgattgcggtcttcttttttatgtcgattatgttcccgaccattttcgcgctgggcgttaaaaatatgggcagccataccaaacgcgccagctcgtttatgattatggccatcgtcggcggggcgattatgccttacttcatgggggcgctggccgaccgctacagcaccgcgctggcctatgggttgccgctactatgcttcctggtggtgctgtggtacggcatgagccaacgacgcgcgtaagcggcaaaattagctaaaaaggcggaggagaccctccgcctttttcttttttgtcgcgccggtggtaaattttgctcagaatgacgggtataaactgctgtttaatatgctttgtaacaatttcgactagaatatataccagatttggctggtcgtattagcgtgggtttttaagaatacgcactaacgattgcagtgaacctttgggagtacaaacaatgcaagagaattataagattctggttgtggatgacgacatgcgcctgcgcgcgctgctggaacgttatctgaccgagcagggcttccaggttcgtagcgtggcgaacgccgaacagatggatcgcctgctgacccgtgaatccttccacctgatggtgctggatctgatgctgccgggtgaagatggtttatctatctgccgccgtctgcgtagccagagcaacccgatgccgatcattatggtgacggcgaaaggggaagaagttgaccgtatcgtgggcctggaaatcggcgccgatgattacattcctaaaccgtttaacccgcgcgaactgctggcccgtatccgcgccgtgctgcgccgccaggcgaacgagttgccaggcgcgccatcgcaagaagaagcggtgatcgcttttggcaaattcaaactgaacctcggcacccgcgagatgttccgtgaagatgagccgatgccgctcaccagcggtgagttcgcggtattaaaagcgctggttagccatccgcgcgagccgctgtcccgcgataaactgatgaatcttgctcgcggccgcgagtactcggcgatggagcgttccatcgacgtacaaatctcccgcctgcgtcgcatggtagaagaagatccggcgcatccgcgctacatccagaccgtttggggtttgggctatgtcttcgtgccggacggttctaaggcatgaagcgcgtgcgtttttcgccgcgaagctcatttgcccgcaccctgttactgatcgtcaccctgctgttcgtcagcctggtgacgacttatctggtggtgctgaatttcgcgatcctgcctagcctgcagcagtttaataaggtgttggcatacgaagtccgtatgctgatgaccgataaactgcagctggaagacggcacccaactggtggttccgccggcgtttcgccgcgaaatttaccgcgagctgggtatttcgctctattccaatgaggcggcggaagacgcaggcctgcgctgggcgcagcattatgaattcttaagccagcagatggcgcaccagcttggcgggccgaccgaagtgcgggttgaggtcaacaaaagctcgccggtggtgtggctgaagacctggctttcgccgaatatctgggtgcgggtgccgctgactgaaattcatcagggcgatttctcgccgctattccgttatacgctggcgataatgctgctggccattggcggcgcgtggctattcatccgtattcagaaccggccgctggtcgatctggagcacgccgcgctgcaggtcgggcgtgggattattccgccgccgttacgcgagtacggcgcgtcggaagtgcgttcggtgacccgggccttcaaccatatggccgccggggtcaaacagctggcggatgaccgtacgctactgatggccggggtcagtcacgatttgcgcacgccgctgacgcggatccggctggcgacggagatgatgggcgagcaggacggctatcttgccgagtcgatcaataaagatatcgaagagtgcaacgccatcatcgagcagtttattgattacctgcgcaccgggcaggagatgccgatggagcttgcggatctcaatgccgtgttaggcgaagtgatcgccgccgaaagcggctacgagcgggaaattgccaccgatctgcaggccggagaaattccgctacggctgcatccgctatcgattaaacgcgcgttagccaatatggtggtgaacgccgctcgttacggtaagggctggattaaagtcagcagcggcagcgaagccagtcgtgcctggttccaggtggaagatgacggcccgggaattaaaccggaacagcgcgaacatctattccagccgtttgtgcgcggcgatagcgcccgtagcaccagcggcaccggactggggctggcgatagtgcagcgtattatcgacaatcataacggtcgcctggagattggcaccagcgaacgcggcggcctgctgatccgcgcctggctaccgattccggtacatcgcgcgttatcgccggcaaagcctgcgaaagagagttgattagcgtatatatataaaaaagccgggcatcgcccggctttgttgtctcagtgacctgattaacgcttcggaccggccgcaaccagcgcagcgccggccggggtatcggtatacttctcgaagttctcaataaacagtttcgccagctgatcggctttctcctgccactgctccggagaaccgtaggtattacgcgggtcgaggatatgggtatcgactcccggcagctcggttgggatctgcaggttgaacattggcagggtgaaggtttcggcgttatccagcgaaccgtcgaggatggcgtcgataatcgcgcgggtatctttaattgagatacgtttaccggtaccgttccagccggtgttgaccaggtaagcctgggcgccggaagcctgcatgcgttttaccagcacttcagcgtactgcgtcgggtgcagcgacaggaacgcggcgccgaagcaggcagagaaggttggggtcggctcggtgacgccgcgctcggtaccggccagcttggcggtaaagccagacaggaagtggtactgagtctggtcagcggtcaggcgtgaaaccggcggcaatacgccaaaggcgtcggcggtcaggaagataaccttggtggcgtgaccggctttcgaaaccggcttaacgatattttcgatatggtcgatcgggtaggagacgcgggtgttctcggtcttcgaaccatcatcaaaatcgatggtgccgtcagccagtaccacgacgttttccagcagcgcatcgcggcggatcgcgtgatagatgtccggctcgttggcttccgacagcttaatggtcttcgcgtagcagccgccttcgaagttaaacacgccgtcatcatcccaaccgtgctcgtcatcgccaatcaggcggcgtttcgggtcggtggagagggtggttttaccggtgccggacaggccgaagaacacggcgacatcgcctttttcgccgacgttagcagagcagtgcatcgaagcgatgccctgcagcggcagcaggtagttcatgatggagaacatccctttcttcatttcgccgccgtaccaggtgccgccgataagctggatgcgctcggtcaggttgaaagccacgaagttttcggagttcagaccctgctctttccactgcgggttggtgcacttagcgccgttcattacgataaagtccggctcgaaggctgccagctcttcttcgctcgggcgaatgaacatgttcttaacaaagtgtgcctgccaggcgacttcagtaatgaagcgcacgctgaggcgggtgtcggcgttagcgccacagaaagcgtcgacgataaacaggcgtttgcccgacagttggtgagtcaccaggcctttcaagtgtttccaggtttcctgggagagcggcttgttgtcgttcttgccattgcctttatcagaccaccacacggtatcgcgagtggtgtcgtcacggacgatatatttatctttcggcgaacggccggtgaaaatgccggtatcgacggcgatggcgccaagattggttaatacgccacgctcataaccttccagtttcgggtcgagctcttcctgatacagcgtatcgaagctcgggttgtggacaatttcctggacgtcattgataccgtaagccttgagatcctgcggggttaaactattaacgcgcatgtcactgctccttagccaatatgtactgctttaaattgtagggtttctttcagggaatagaccgcgaccaggctcatagatttacgtatctcgacaaacgcctttcttacgaaaaacacagtgactcctgtcacgaagtgcgcgtgattatctcaggaaaacggccgcaggtggcgatagatgtttccgaatggttaaaaagtaattaaaaaaactgctgaaatgtgaatgtaatcgctttcttgaaagaaagttacgtaactctttcagtgaaaatcgattcaacacgcggtcgaaatagttgacgccaggcgcggcgggtcagaaaaacccggcaacgcccggcgagaggggcaattagtgtacctgcggatccgccggcgaggcgttattgcggatctcggcgatatccatcgcgttgaacagataatgattaccgcagtagtcgcaatgcatatcaatttcgccttcgtcggcgaggatgctgtcgacttcttcatccggcagcgtcttcagcgcatcggcacagcgctggcgagaacaggtgcatttgaactcgacgtcttgcgggtcgtataccgtcacctcttcctcatggtacaggcgccataatacatcggtcgccggcagggtgaacagctcttccgccttgatggtctcggtcagggtcgccagatgctcgaagtcgttaagctgagcgtcctgagccggcatcacctgcagcagcatgccgccggccaccgctttaccgtcgtgctcgccggtacgaatgaacaggcgggtcggcagctgttcggaacgctggaagtaatcttccaggcatgccgccagggtatcgccttccagcccaacaacgccctgatagcgctcgccttcctgtggagagatggtaatgaccaggtagccgttgccaaccagcgttttcaggtccgcgccttccgggatttcaccctgaacgcgagcgacgccgcgcagctgctgctggttattgccgttgatcaccgccagcgagagcgggccgtcgccctgcagctgaacggtaatatcgccggcgaacttcagcgtggcggtcagaaggctggtggcgaccagcagctccgacagcacggttttcaccggctgcgggtagctatggttggccaggatctgttccaacgtgtccgatacggtgaccagttcaccgcgcacggcatagttttcaaacagataacgatgtaattgatcgtgttgagtcataatcatctctcttgctggcggcaacgctattcgctgtcgccgtgtttaaatctcatcaggtcgcggcgttcttttttgtccggacgtctgtctgggtgcggcatcgtgagcgcattcagcttacgcgccagcgccactttctcgcgtttctcgatactctccgccgtctcttcgtacagcatgacggcttcgctggctggcctgcgctgttcggtaacgtttttgacgataacggtacgctcgtcgttgccctgacgcagggtcagggtggcattcaactcgacgattttgctcggcttactacgttgtccgttgtagtgcactttgccgccttcaaccatctcgcgtgcaatggcgcgggttttataaaagcgggctgcccaaagccatttgtcgagcctgacgctttcagcgggcttatctttcatggcctctcctccggaatcagggaagggatcagccgccggtaatcgttcacgccaggatggcgggcatactgtttttccgccaggccggaatccggattggtgacgcccaggcaataacgaatgccgaactgcgccgccgcgtccaggatagcctcgctgtcatcgacaaacagcgttttgcgcgcatcaaggccggtttcttccgccaccgcgcgccacaggcgctgatcctctttcggataaccaaatgtgtgggtggaaagtaataaatcaaggtgcgcgtccagaccggtgtgcttaagcttcaccgccagattatgcgggtgcgcgttggtcaacaggatgcggcgcttgccgctggcccgcagcgcatcaaggaatggcacggtatcttcccgcagttttgcccgcggtccctgctcgctggtcatcgcacaaatgtccaaacccagtcgctcgctccagtaatcaagacagtaccagtttagcgtatgctgcacggcgtgatactcctggtgcattgccgctttggcttcctgcaggttgagtccgcgtgcggcgccccaggtttccgggaccagtttttgccagaagtagttgtcgaaggcgaggtcgagcagcgtgccatccatatccagcagaacggtatcaacctcctgccacgcgatattgatttgcatggtgagtctccagcgaggggggaaatgcgcgacagggtatcacaccctgccgcgcaggaattaatcttgatgatccggggaagggatgagaaccggattcaggcagctttcataatatttttgaatttcttccatgcgctgacgctggcgctgatagcggcggatcgcctgcacgccgtgccacgacatacagccaagcatcgccagcagcagcagagtggtgccaagatagcgccacagcccgctgcgatcgggaatgcggtgcaggttgatatgctgggtgccattggcgtcggtataaagattggtgacaatcccctccgcatggaatggtgtatgcatcagcatacccgccagacgctgcagctcgccccactgctcgtgggcgggataatcgtacaggctgatagccggccacggctgattgaccagttcgctgccttcatcgctggcgatcaggaatccgccaggggccgggctatttagcgcctgcgccgcgcgggaggtttcacgcatcacaaacggcgcggttgaggtggtcaccagattctccagcgattcggcgctcaccgggcgcagcaacacgtttaccccatcgagcttaccggcggtggcgcgtttggttagcgcttcccagttgcgggtattgccaaggttgaccagcgcgttcttcagacgcacgcaatcatctttcgccgaacagagctcgttggttttcagcacgatatcgccgaagtcatccagcagtaccattcctgatttttgaattgccgaacgtaatgccgggctaacgtgtgaatcgtcgtccgggtcaggatgcaactggcgctgtaccgcctgtaccagcgccgtggctttaccgacgatatcggactccggcagcggcaggggaggcgcgtcgttccagatgatctgcgaacaatcgaacggcgtaaacggtgaggcttctttcgcgctccaggcgcccggcgtacggatgttgcacattccggtaccttttaactgcagcgtgtcgccgatgcggactttcgccttctcaagctggccgacggtggtggcttcgatggtctgcgcccccttaagccaggagagcgtgaatttaaagggcatattcagcgggacgctaatccacagcatgatgacgaccagcagcgcgccggcggcgataatcgcgctgcgtagccagtactgcagcgggaagtttttcacttcatcgtgcagcgacaggaagcgcccctggcgaacaacgtggcggttaagataaatatcaatatcggtttgctgccccaggtcctgggcgatccacggttgccagtggcgcggatagataaggtcgataatccccagcgaaatattattgacgtgttcctgatcgttctcgccaaacagtccccagcgtttcggcattccgcgcaggcagtggatctcgcgtagcgaaccggccagcggcggcgcatagatgccccataagcccgctgccaacaacagtacgccgccgccgagcagccacggcgcaaagacgtcaggggagatcaggcagcaatagaacagcaggaaggctgcgacgatcataatcccttcgcgcaggctgtcaggacggctgagagcatgctcttcctgagtttcctggcggatgttcagcagctcgacctgctcgctctcctcaccgcgaatcgacgcctgggtagcagatgagcgttcaagcgcgtagctgcgggcttcctgcggatagtcgcgcaaggtgtggtcattgagaacaatcaccagcggcaggctgtcggttgggatcagcgagacgctgttctcgtcgttgatatgctgttcccagaacggcggcaggtgaacctccaccgagtcgaggaagtatcgccatttgttgggctcatcagacgaaatgccgtagcgggtgacggcgcgggtgacggtataaacggtgtcgctctgctcattcagtttcagggcgacaggcgcgacgctggcgccggtcgccggtacctgttgcgactggctgaggccatcgagatacttttcgaccgcctggcgttcatcatcagaaagcttgcgggtcgtcgcgtcgctaaaggcttgcagtaaggggaggcgacgacgtctggcatgagatcgataccaccacccgataagcaagacacagagtagcagagctgtgaaaaaggtcagaaaggtgcccatgcccatcccatcgtcatagtaattttaattgtttatcggcacatgttgtctaatgcaggaaattttattgtgcaatgcagcagcatgtaagcttatcaaaaacgggaaaactcaggaatcggtaaattctcaaaacaaattcaacctattgacttttttatctttatgaatctttgcattgcaagcaaaacgttgcaactatgtaaattagtggcaatttggattgccgaaaccgtgctgcgtatcgcacaatgacttctgtaatcacagcatagaccgatgacaatgagcaaatcattacaaaaacccaccattctcaacgttgaaacggtagcgcgttcgcgtctttttaatgttgaaagcgtggacctggagttcagcaacggcgtgcgtcgcgtttatgaacgcatgcggcccaccgcgcgtgaagccgtaatgattgtgccgattgttgacgaccacattattttaatccgcgaatatgcggtcggcaccgaatcctacgaactgggtttctccaaagggcttatcgaccccggcgagacggccatggaagccgccaaccgcgagctgaaagaagaggtgggttttggtgcccgtcaattgaccttcctgaagaagctcagcatggcgccatcttatttctccagcaaaatgaacattatggtggcggaagatctctatccggaatcgctgccgggcgatgagccggaaccgctgccgcaggtgcgctggccgctgtcgcagctgatgtcactactggaagaagaagacttcaatgaagcgcgtaacgtcagcgcgctgtttctggtgcgtgaatggctacaggcgcaggggcgtttgtaagcggctaacattgttgtcgccatcgtcaaagccattttcgctgaaagtggctttgacttaaacctgctggaaacattgctggcgctttactgatggtgaagaaaacgaaagttatgccaaacttagtacgtgaataattgaagcggtaatacaaggaataagaactaacattacagatgtcttccagaaaaaacagaatttcttcatccattctattgataatgtcggtttttgtaagaagaatgaatatgcgttgctttcttttgtgatgaaaaggatttttttattttcttttaatcccagaaagaaacgtgatacaggataagctccaaaaaaaccagtcatcgattggatgttgtatagcattgggaattcaagcttgcttgctaaataactttctaagatggcactatattcttttctgtgagaaatgaatatgaaatacgagacgatcattaacaggatgcctatcacacaacaaatcaataacgcatagctcaggtattgcatattactagtatcctgttaattccaatattttttttgacgagtactcgccgaatttaccacctatatatcctccggcaagacccccaataatcgcgcatggcaatgcccccgttccagctgttgctagccctacgcccacgcaaagggctactgcgccggtggagccataagcacctccggctaaacctaacgtcgtgcttgcaccaaatttaaaatattctttaaatgctgtattaccacattcattttctcttccagtagtacaagattttataacgttatttgttgccccagcaaacgaaaatgcaatgccaatatatccgccatactttaaaaaacgggccgctctggcagcattaccggtataggtggaatatccagggatagcacctactccaaccgttgaccattcatggacaattgaacgactggataggtttaatgctcttcgcatatcctcatatggccggaatttgattgagtgttttgctaaatatttaataataggtttattaactaatattttaagttcagccagtagttgatttctctcaacaaaaaactgttgtcctataagcgtaccttgcgtccgaaactgattttgatagctggcctctattttttttagcgtggtttctatagctttgaagtatttttctccagcatcgccgatagcgccaaaaattttatctcctgcagtcgttattccggcaatcattccatagtttctttgaagaaaactggcctccatcggtactgactcctaccagattgttatttacctgttgttttgcctgatggagcaaacggagtgtctgttctgtcatcgtgctatttgggtcggcgacaatgagtatttgcccaggtttgacccaacgtacctgcatttagttgttcaaagtaacgcgcggcactgctattgcgctttcggaataacaacccagcttgaagagatatagagcccggctgttcgacgatacagtaaccaggagctagttttcttgacataaaaaatccttgtcttagttgtttccatggaaagggacatcggaagttttttagaacagtaagcctttttttgtctgagatagcaatgatagaaggtcatcatcaacctgagcctgctggaattctttgctcataaaaaactgcaccttacttcgttgggtgtccaactttttgggtgcagttcatatcggcggtattttatggttactctcaggccaccttttcagaaggtggctttcactagaacaactcgtgggtttcgccaccgctatcggtaatggtggtgccaacttcgcgcaccgcctgatgggtaggctgcgtgccctcgatgaagtactcggcgcggctgttgccgccgttagccagttgacctgtgctgcggtcgatattcaccgtcacaatacccggcggcggcgttaacggctcttccggcacgccttcaagtacccgtttcataaagtcatcccaggccggttgggcgcttttagcgccgccttcataacccgaaatctgatctttaatcgcgccggaagcggtggtacggcccaaatcgcggcggtggtcatcgaagccaatccacaccgacgtcacgacgccaggaccgtagccggagaaccacgcgtcttttgagctgttggtggtaccggttttgccgccgatatcatgacgttgcagatcgcggcccgcacgccagccggtgcccatccagcccggttcgccgaaaatattggtattcagcgcgctcttaatcaggaaggccagcggcgtgttgataacatgcggggcatactccggcgcgccgctttgcgcgaccagcgactgattagcctgctcaagctgcggctgcggcggaacgtcgccgctttgcggctcctgagaggtggcgacctcttcaacatcctggttttccagcacattggatttcggcgtatcgccgtagatcaccggcgaattacactgcggacaggcgatcttaggccgctcttcaaacagcacgccgccctgatcgttctcaatcttgctaataaagtacggattaatcaggaagccgccgttggccattaccgaatagccgcgggcgacctgtagcggggtaaaggaagcggaacccagcgccagtgattcggtatggacgatgttctgcgccgggaagccgaaacgctgcagatactctgccgcataatcgacgcccattgcgcgcatcgcgcgcaccatcaccacgttcttcgactggcctaatccctgacgcagacgaatagggccggcgtactgcggcggcgagtttttcggccgccagtcggagcccgcgccggcatcccagcgggagatcggcacatcgttaagcatactggcgagggttaagcctttgtccatcgccgcggtataaaggaacggcttgatattggagccaacctgacgcagcgcctgggtagcgcggttgaacttactctgattgaagtcaaagccgccgaccagagcgataatcgcgccattttgcgggttgatagataccagcgcggagttcacttccggcacctgcgacagccaccatttgtcgccctctttgcgcacccaaatttgctgcccggtctgaatgacgtcggtcactttgcgcggcgtcgagccttgttgcgtatcggaaacgtagcgacgcgcccagcggacgccatccatcgttaacgccaccgacgtgccgttgcccagcaacgcgactgcttcctgcgggttcgcggaggtgactaccgccggggccagcgggccgacgcccggcagttttttcagcgtatcgaggattttttgttatcccacggggtctcgccaactttccacagcacgttggccgggccgcgatagccgtggcgcatgtcgtaatcgagcacgtttttacgcaccgactgctgggcagcctgctgatttttacgcgtgatggtggtgtagacgcggtagccgtcttcgtaggcctgctcgccgtagcggttgaccatctcctgacgcaccatttcgctcagatacggagcggagaaggcgatttccggcgtatggtagctggcgtcaatcgcttcgctgcgcgcctgatcgtactgtgcctgagtgatatagccttcgcttaacatacgcgacagcaccacgttgcgacgcgcggtcgcgcggtccagcgaatagagcgggttaaaggtggaaggcgctttcggtagaccggcgatgaccgccatttcgctcagcgtcagctgatcgaccgttttaccgaagtaaacctgcgcggcggcgccgacgccataggcacggtagccgaggtaaattttgttgaggtaaagatcgagaatttcgtctttattcagcagttgttcgatgcggattgcgaggaaaacttctttgatcttacgcgttatcgttttttccggactgaggaaaaagttacgtgcgagctgctgagtgatggtactggcgccctgcgaggcatggcctgagaacatcgccacgctggcggcgcggaaaatccccaccggatcgacgccatgatgctcatagaagcggctatcttcagtcgcgataaacgcttttatcagctctggcggcatctgctgcagagtgacggggatgcggcgcttttcgccatattgcgcaataagctcgccgtccgcgctatagacctgcatcgggatttgcagacgcacatcctttaaggtcgcgacgtcggggagttgcggctctataaatttgtagaggccataaatcgagcctgctcccagcagaacgcaacaaactgcaaggataaaaagatactttacgaacttcaccggagaattcccatttagttttatttgggcagtttataaacaaacgcgcggtagtataaaggcaagccaggagcattgatatacccccagggggcggcttgctggcgctatgcctttcagacggcgtgtcgatcgacgctaaaagcctccatttcgccatatggtatatccaggctgctccttgaatcgcaatcgcggataaggagatctaagcatgactttcagaaattggcgtataggaattcatattcaacaggatagcgtcgccatagtggcgctgttgtacgaacgcgggcgctgggctttgcgtcgctggtggcgaattccgctgccgcccggcctggtggtgcagggcagcatcgttgacatcaatgaggtggtgaagcggttacgtgaatggcgccgcgagctgccgttacagcatcaggtgtgcattgcgcttcctgccagccgtacgctgcaaaagcagttgcccgcgccacaggtgtcgctgcgggaaagcgaaagagcgacatggatagcgggcacgatggcgcgtcagctggaaatgcctgcctcttcgctgtgtatcgattacgccgctcgcgcggcaaacgatggctggcaggcgacggcggctcagcgtttggatatcgacaccctgcgtcaactggcgcggaggctgaagctgcgcctggcggcgatcgtgccggatgcggctgctctcacttcttttttcccctggcttactgacgctactcagggcctggtctggcagggggacgcgcagtggttatgggcgacccaggtgcgctggggctattgtccatgcgctgaagccccctctttcttgcacttaacctcgcgcctcaatgatgaacagttccagctctgtagcagcctgccgttggcggaaaatagctttgattgttggagcgtgatccaccgcctgcagccgccgcttcccgcctgcggcgaccgctttgctatcgcgcttggtttggcgctgggaggtaaataaccatggctcagcagattaatctcctgccgtggcgcgagacgcgacggcggcaacgcttgcgtctgggcgggctgctggtggtagcgatggcgctaagcatcgtcgccctgacgatagctgtgcgtacgttacgccagatggacgcggcgcagcaggcgatgcatacccaggccgacaatgtgctttattccgcgctgttgcatcgcgagcgggatatgcgtgaggaaatacagcgcggtgagcgacaggcacggcaagcgcagcggcgggcggagacgcgtgcctggcagccgcggctgttatcgctggccgcactattgccggagccgctgtggctgaccaggctggactaccagctgcagggcatcaccctctacggtctggcgttgaacctcaaggcggtggcggcgctggaaaaggcgctcagcaagctggagggctttcaaccggttacgccaggggcgacgcggcgtgatgcacaggggcgctggtcattcagctttttccttgcaggagaaactaccgatgcggttagcgattgaacacctgctggcgctgcgtgggtggtcgttgacgttactcttcggcgcagtgttggctgcggcaatgtgtctggcgttttcgcttgctgctgtcagcgtttcacagcccgcgccagcgccgctaaaggcgcaatggcggcgagtattgccgctgcgcgccacgctacagcagcgtgtggtccgtagttggaaggcccggcgtttttcgccgctggagccgcctgtcgccggcgtcactttacagacctggcaaccgcgagggcgcggcggcgaaatgcgtgctgtggttgactggcaggcggtgccgccgctgtttgcctggcttgccgattgtggggtacaccctggcgctttttcattaaatgacgaaaaaggggcgttgcagttgtcgctgcagctggagagggacgatgaagcataaaggatacatgctgctgttggtttgcccgctgctgacaggggcgcgggatccttttttacccgtcgaggatcgctgccagaccacacaactgacacagtggcgctatggcggcggaactggccacccggcgctgtggctggctcttattcaggatcacaccggtcagtggcggcgggtacgacgcaacgacgttttgccaggcggctggcgaattcgacagctaacggcagaaacattaactctggaggccaatgccgggtgtgaacccgtacgctgggtctggttacgtaagggaagccaacatgatgcgaaggataaatctgctacttctgctgctgccgttgctggccgcggcgacgaaaaaagaacccccggtgtcgctggtggttgatgatgtaccggtggtccaggtactgcaaagcctggcggaaatgcaaaatcttaatgtaatcgtggcgccggaggtcagcggtacattgtcgctccatttaaacagcgttccctggcgacaggcgctccagtcggttctcgatagcgccgggctgacaatggcccggcagggcacggtgttgtacatccatacacaggcgtggcagcaagcgaaacgggcgcagcaggaagccgagcaggtcaggcgctggcagaatctgccattacgcaaccacagtatcccgctgcgctatgccgacgcagacgaactggcgaaatccgggggcaagctgttgagcgcccgcggcacgatgaccgtcgatcggcgaactaatcgtctgttaatccgcgatgacgatcgtcatctgccgacgctgaaggcgtgggctgaagagatggatctgccggtcgggcaggtggaactggcggcgcacattgtgtcaatgagcgcgaccagcctgcgtgagcttggcgtgaagtggagcctggcggaggccggcagtacgccggggatggggaaaattactaatctgagcagcaatctggcggtgtcagacgcaaccacccgcgtcggctttaatatcggccggatcaacgggcgattactggaactggagctttcagcgctggagcaaaagcagcaggtggacatcatcgccagcccgcgcctgctggcgtcgcatatgcaacccgctagtatcaaacagggcagcgaaatcccctatcaggtctccagcggagaaagcggcgccacctcggttgagtttaaagaggcggtcctggggatggaagtgacgccgacggtgctgcagcaggatcgcgtgcgcctgaagctgcgcattagcgaaaatacgccaggccaggtactccagcaggaaaatggcgaagcgttggcaattgataagcaagaaattgaaaccttagtcgaggtgaaaagcggcgagaccctggcgctgggcggtattttttcacaaaagaataagtcggcgcgcgacagcgtgccgttgcttggcgaaatccccttgctcgggcagctgtttcgccatgatggtaaagataatgaacgacgtgaactggttgtcttcatcacgccgcgtattctggcagtacattaagcgggtttttcatgctaaacacgtttcaggtgtttgacgcggggacggatttagcatacaaggggtaccgatttgagagtcgggtacgacatcaatcctccctttatgtccggcgattttattctgttgccaaaccagccggagtattgagataatttttagtctgactctcgctctattgcatatgaggtttcagttcatgtcctgctgcgctgggtgtctgcgaagcgggtttatcattaacgaatagtcttagtagtaccgaaaaaatggcagagaaacgcaatatctttctggttgggcctatgggtgccggcaaaagcactattgggcgccagttagcccaacagctcaacatggaattttacgattctgatcaagagattgagaaacgcactggcgcagacgtcggctgggtcttcgatgtcgaaggcgaagaaggcttccgcgatcgtgaagaaaaaatcatcaatgagttgacggaaaaacagggaatcgtactcgccactggcggcggctcagtaaaatcccgtgaaacgcgtaaccgtctctccgcccgcggcgtggtggtctacctggaaacaacgatcgaaaaacaacttgctcgtacgcagcgcgataaaaagcgtcctttattacaagtagatgcgccgccacgtgaagttcttgaagcgttggcagatgaacgtaatccactgtatgaagagatcgccgatgtcactatccgcaccgacgatcaaagcgcgaaagtcgttgcaaaccagattattcatatgctggaaagcaactaattctggcttaataaagtgcgtcagagtaaagcaactgaggtggacgtcgcgttatggagaagctgactgtaactctcggggaacgtagttacccgattaccatcgcggctggtttgtttaacgatccagcttcttttctgccactgaaatcaggcgaccaggttatgctggtcaccaatgaaacgctggcgccgctttatcttgataccgttcgctccgtactggagcaagcgggtgtcaacgtcgacagcgtgatcctgccggatggggagcagtataaaagcctggcggtgatggatacggtatttaccgcgctgttgcaaaaaccacatggccgcgacaccacactcgtggcgctcggcggcggcgtggttggcgatttaaccggttttgccgctgcgagctatcagcgcggcgtacgttttattcaagttcccaccacgctgctttcgcaggtggactcttcggttggcggcaaaacggccgtaaaccatcccctcggtaaaaatatgattggcgccttctggcagccggtttccgtggtcgtcgaccttaattgtctcaaaaccttgccgaagcgtgagctctcctccggcctggctgaggttattaagtacggcattatcctcgacggcgagttcttcaactggcttgaagacaacatcgatgcgctgatggcgctggatgaatcagcgatggcgtactgtattcgccgttgttgtgagctaaaagccgaagttgtcgctgctgacgagcgcgaaaccgggttacgtgctttactgaatctgggacatacatttggccatgctatcgaagctgaaatgggctacggtaactggctacatggcgaagctgtggcggcaggaatggtcatggcggcgcatacgtccgagcgtttagggcagtttagcgcgcaggatacgcagcgtatgattgcgctgttgcaacgtgcagggttgccggtacgcgggccgcaggaaatgtctgccgaagcgtatttgcctcacatgatgcgtgataaaaaggtactggcaggcgaaatgcgcctggtattaccgctcgctataggaaagagcgaggtccgcggcggagtgtcgcacgatgtagttcttggcgcgattgctgatactcagcaggcgcaacaataagaaggtctagccgcgtccgcgcggcgttatcatttcgggcaacatgcaataatcgtgagcataagccttttagtggggtgttaaatggatgatttcaaaccagaagacgatatgaaagccgatcgcaacgatcgtcgtgctggtcgttcccgtcagtcttccgagcgtgacgccgatccgcagatcaatttcgacgatctcgatcttgaggccgatgaaggccgtccgacgcgcgcgaacaaagcccgtcgtgaacgcgatgaagaagagtacgaagaggacctcgagtccgaagaagaagtagaagaagagcagcaggttgaacgccgcccgcgtaaacgcaaaaaggcccctgctaagccggcctcccgccagtatgtcatgatgggggtcggggtgctggtactcctgctgctgattgtcggcgtgggttcggcgctgaaatcgccatcttcttccaatgaatccgcttctggtgagaagagcgttaacctgtcaggcgatcaaagcatgactgctgaccagaacaacaatgcagcgcagccggtcgatcaaactgcgggcaacaccaaccagcaacagccgcaggacgtttctctgccgccgatcgcttctaatccgactcaagggcaaccagcctccgagccgcagggccagcagcgtgtggaagtccagggcgacctgaacaacgcgctgactcagcagcagggtcaactggatagcgccgttgctaactccaccttaccgaccgaacctgcgaccgtagcgccgatgcgtaatggtgccgcgccgcgtcaaacgaccgaacgccagacggccgccacgccgcgtcctgttgagcgtaaacaggtggtgattgaaccgaaaccgcaaagcaaaccgcaggctaccgccaaagcgccggttgaaaccaaacctaagcacgtagagcgcgcgccggcggctaccgccagcaagcctgtcgccactgcgcagactaaaccggctgcgacaaccgcgccaacggctaccgcgactgcgccggccgcgacgacctccaccccggcggccactgcgcctgcggcgaccgcagcgactggcagcaaaacggctggcgatgttggttcgatgaagtctgcaccgtctggcaactatacgttgcagctcagcagctcctctaactacaacaacctgaacaactgggcgaagaaagagaagctggaaaaatatgttgtctatgagacgactcgcaacggtcaaccgtggtatgtgctggtcagcggcatctacgcttcgaaagatgaagcgaaacgtgctgtcgccacgctccctgcggatgttcaggcgaaaaatccatgggcaaaaccgctgcaccaggtacaagctgacctgaagtaatgccgcgagtagtcttaagcgcaggatgctgtcggagcgatttctccacagccggagaaagtgtaattagttaggcagcatgaaaaagaatcgcgcttttctgaagtgggcaggggggaaataccccctgcttgatgatattaaaaagcatttgccggaaggtgaatgcttgattgagcccttcgtgggcgccgggtcggtattcctgaataccgacttttctcgttatatcctcgcggatatcaatagcgacctgatcggtctgtataacatcgtcaaattgcgcaccgacgaatacgtcagcgcggctcgtgagatgtttacgccggaaaacaacgccgcggagcgctactaccagtaccgtgatgaattcaaccagagtcaggatcccctgcgtcgtgcggtgctgttcctgtatctgaatcgtcatggctacaacggtctgtgccgctacaacctgcgcggcgagttcaacgtgccgtttggccgctacaaaaagccctatttccccgaggccgagctctatcacttcgccgccaaggcgcagaacgccgagttttattgcgaatcttatgaagagtgtatgaagcgcgccgatagccgggcggtggtctattgcgatccgccgtacgcgccgctgacggcgacggcgaattttaccgcctaccacaccaacagcttcaaccttgatcagcaggtactgctggcgaaaaaggcggaatcgttgatgaaaaagcggatcccggtgcttatctcaaaccaccgcacgccgctgacgcaggagtggtataaaaacgcggcggaaacgcatattgtgaaggttcggcgcagcatcagcagcaatggtggtacgcgtaaaaaggtggacgagctcttagcgctgtaccgtccaccgaagaccaaataaatttcaaggagatgcggatgaagcagtatttgattgccccttcgattctgtcggctgattttgcccgtttgggcgaggataccgctaaggcactggcggcgggcgcagatgtcgtacacttcgacgtcatggacaaccactacgtgccgaatctgacgattggcccgatggtgctgaagtcgctgcgcaactacggtattaccgcgcctatcgatgtgcacctgatggtaaagccggtcgaccgcatcattcctgattttgccgaagccggcgccagcattatcactttccatccggaagcctctgaacacgtcgaccgcagcctgcagcttatcaaagagcatggctgtaaagcggggctggtattcaacccggcgacgccgctgagttatctcgattacgttatggataagctggatgtgatcctgctgatgtcggttaacccaggctttggcggccagtcctttattccgcatacccttgaaaaactacgtcaggtgcgtcagcttatcgatcaatccggctacgacattcgccttgaagtcgatggcggcgtgaaagccagcaatattggtgaaattgccgccgccggtgcggatatgtttgtcgcgggttcggcaatcttcggccagccggactacaaaaaagttattgatcaaatgcgtagtgaattagcgaaggttagtcatggataaattacaggccatccgcggcgtggcattcgacctggacggtacgctggtcgatagcgcgccgggtttaaccgccgccgttgatagcgcgctttacgcgctggaactgccggtggcaggtgaagaacgcgtcgtgacctggattggcaacggcgcagacgtcctgatggagcgggcgctgaactgggctcgccaggagcgcgccacgttacgcgcggcgatggggaaaccttccgtcgacgatcatgatataccgcaagacgaacaactacgcgttttgcgtaaactgttcgaccgctattacgccgaagcggcggaagaaggtagtttcttgttccctgcggtggccgatacgctcggcgcgctgcatgccaaaggcctgccgctggcgctggtcaccaacaaaccgacaccgtttgtggcgcccttgcttgaggcgctggatatcgcgaaatactttagcgtggtgatcggcggcgacgatgtgcagaataaaaagccgcatccggatccgctgctgctggtggcggaaaagctctctctgacgcctgccgaactcctgttcgtcggggattcacgcaatgatattcaggcggcgaaagcggcaggttgccgctctatcggtctgacttacggctataactacggcgagccgatagcgctgagcgagccggattttatctttgaccaatttaatgaactcttgcccgctcttgggctaccgtacagtgaaactcaggaattaaaaaatgactaagcccatcgtttttagtggcgcacagccctcaggtgaattgaccattggcaactatatgggtgcgctgcgtcaatgggtaaacatgcaggatgactatcactgtatttactgcatcgttgaccagcacgcgatcaccgtgcgtcaggatccgcagaacctgcgtaaagcaacgctggatacgctggcgctgtacctggcctgcggtatcgatccgcaaaagagcactatttttgtccagtctcacgtaccggaacacgcacagctgggctgggcgctgaattgctacacctatttcggcgaactgagccgcatgacccagtttaaagacaagtccgcgcgctacgccgaaaacattaacgccggtctgtttgactacccggtactgatggccgctgacattctgctgtaccagaccaaccaggtaccggtaggcgaagatcagaaacagcatcttgagctgagccgcgacgtcgcgcagcgctttaacgctatctatggcgatatctttaaagtgcctgagccgtttattcctaagtccggcgcgcgcgtcatgtcgctgctggagccgaccaagaagatgtccaagtccgatgacaaccgcaacaacgtcattggcctgctggaagacccgaaatcggtggttaagaaaatcaaacgcgcggtgaccgactccgacgagccgccggttgtccgttacgatgtgcaaaacaaagcgggcgtttccaacctgctggatatcctctccgccgtcaccggccagagcattccggaactggaacagcactttgaaggtaaaatgtacggccacctgaaaggcgaagtcgccgaagccgtttccggtatgctgaccgagctgcaggagcgctatcaccgtttccgtaacgacgaagcgttccttaatcaggtgatgaaagagggcgccgagaaggccagcgcgcacgcttctaagaccctgaaagcggtatatgaagcgattggctttgtcgctaagccgtaataaggctcgctgaaggtaaaaaaaccgggattatcccggtttttttgtctttgtcagagcgcattagcttaatggtgagagaaccagttcagcttgtcgcgtagcgccaccacgcggcccacgataatcaacgccgggctggccatctgctgcgccagaatatccagccgatccagggtgccggtgacgaccttctggttgaccgcggtgccgttttcgacgattgcggccggcatatccgccgccatgccgtgggcgatcagcttttcgcggatcgccggcgcctggtttagccccatatagaacaccagcgtctgtttttccgccgccagattttgccagtcgagatcgctaccggttttcagatggccggtgattagacgtacgccctgggcgaaatcgcggtgggtaagcggaatgcctgagtaggccgagcagccggaggcggcggtgatccccggcaccaccgagaacggaatacctgccgcgcagagggtctccagttcttcgccgccgcggccaaagataaacggatcgccgcctttcaggcgtacgacacgtttgccgctttgcgcttcatgcagcaggatttggttaatttcctcctgcggcacgcagtgataacctgcgcgtttgccgacaaacacccgatcggcgtcacggcgcaccaggttcataatatcgtcggagaccagtcggtcataaaccaccacatcggcctgctggatctgctgcagccccttgagagtgagcagcccggcgtcgcccgggccggcgccaaccagcaccacttcgccgcgatgttccagcggctcattcaataactgttccgtggtgtcggcaacggcctgacgatcatcgttcgccagcgattgggcgagacgatcgttaacaaacagtttttcccagaagcggcggcgctcgccgacggtagcgaactgttttttcacccttgagcgcaactgcccggcatagcgggcgatttgcccgaggtgcagcggcagcagcgattcgagcttttcacgcagcaggcgcgccagcaccggggaggtaccgccggaagacacggcgaccatcagcggcgagcggtcgataattgacggcatgataaagctggcctgacggggcgcatccaccacgttgcagaaaatacgccgtgattcagcggcctcgctgacctgctgattaacgacatcatcgtcggtggcggcgatcgccagccagcagttatcgagcagcgcaggattgaaatcgccctgcgccagcgtcagcatttgcgcctcggcccacacctgaaactgcggagtaaactggcgtgagttgaccgttaaccgggcgccggcgtcgagcaacagacgcgccttgcgttcagcgacatcgccgccgccgaccagcaagcagtcgcgatcgcgtagttggcaaaaaataggtaagtggtccacggcagatcctcacggcaagggggaaagggagtgcggtcgtagcatagcagcagagggaatcacggagatatgaattttgccgcctctacttattagtggtcataagctgatgatatggttcccccgccgcgcggagggaaccttgcggcatcaggctttcagctgcactttgccatctttaacacgggcttcgtaatgggcgatagagtggctctcatcttccatgcacagcccgtcgctgaggcggaagcgctgctttttcagcgggctggcaacccacagcgcgccgtcatgctcagcgataatcccgcgggacagcacgctggcattgaagaacggatcgatattgctgatggcgaacactctgtcgtcatggtacggacgaaagatagctacctgctgttgccccagcagcgcacagacgccggtcgccggcaggatgtcgtcaattttgcagatgtttacccactggctcatacgttttcctccaccagcgtgaccgggatgcgctcatagggcgtggccgggcgatgctggtcacgttccggcaccacctgaacgttcgggtcgcgctgatcgctgttgataaagtgtttgaagcgcgtctgcgccgccgggttattgacggtctcggtccattcgcaggcgaaagcggcgcgcaggcgagccagctcttcttcaaggtgatcgttcaggcccagcttatcgtcgatgatgacgctgcgcagatagtcgatgccgccttccatgttgtcgagccacggcgcggtacgggtcagcttatcggcggtgcggatgtagaacatcataaagcggtcgagatatttgataagcgtatcgcgatcgagatccgcggccagcagatcggcgtggcgtggtttcatcccgccgttaccgcacacgtacaggttccagcctttctcagtggcgatgatcccaacgtctttaccctgggcttccgcgcattcacgggtacagccagagacgccgaacttcattttgtgcggggtacggatgcctttatagcggttttccagttctacgccgaagccgacgctatcgccgacgccgtagcggcaccaggtactgccgacgcaggttttcgccatacgtaacgctttggcgtaggcatggccggtttcgaagccggcttcaatcagttgacgccagatttccggcaggtcgtctttttgcgcgccgaacaggccgatacgctgggagccggtgattttggtatacagattaaattcgcgcgcgatgcgaccgacggcaaccaggccttctggcgtaatttcgccgcctgcggagcgcgggataaccgagtaggtgccatctttctggatgttggcgaggaagttatcgttggtgtcctgcagcggcgtgtgctgtggtttgaggatgtactcattccagcatgaggccagcagggaaccgacggtcggcttacagacttcacagccgtagccctgaccatgtttttccagcagttcgtcgaaggttttgatgccttccacgcggatcaggtggaacagctcctggcgagagtaggcgaagtgctcacacagattgttgttcacttcgataccctgtttcgccagctcggcgttgagtacctgcgtcaccagcggaatacagccgccgcagccggttccggctttggtttccgctttcagcgccgccacggtgtggcagcctttattgatagcggcaatcaggtcgcctttgctgacgtcgaagcaggaacaaatctgcgcgctgtccggcagtttatccacgccgatggacggcttgccgctgccggcgtgggccgggaggatcagcgaatccgggttttccggcagctcgatggtattcagcaccagctgcagcaggttgccgtaatcgctggtgtcgccgaccagtaccgcgccgagcagggttttattgtctgcgctgacgataagacgtttgtagacctctttgctttcgtcgagatagacgtagctacgtgcgcccggcgtgcgcccgtgggcgtcgccgataccgccaacgtcaacgccgagcagcttcagcttggcgctgaggtcggcgccggtgaacagattgtcgttgccgaggatatggtcaacggtaacctgggccattttgtagcctggagcgacaagaccatacacgcggttattccagctggcgcattcgccgatggcgtagatatccgggtcggaggtctgacagcaatcgttgaccataatgccgccgcgctgggcgacggcgagaccgcattgagtagccagcttgtcgcgcggacggataccggtagagaagacgatgaaatcgacctgcagttcgctaccgtcggcgaagcgcatcgttttgcgcgcgtcggtgccctgctgaacgatctctttggtatttttgctggtgtgaactttcacacccatactttcaatcttacgcttcagctgctcgccgcccatctgatcgagctgctcggccatcagcatcggagcaaactcgatcacgtgggtttccacgccgagatttttcagcgcgccagccgcttccagaccgagcagaccaccgccgaccaccgcgccgcgtttgctgcgacgggcgcaggattcgatggcgttaagatcttcaatagtacgatagacgaagcaatcctgggtttccgcgcctttaatcggcgggatccacgggtatgagccagtcgccataatcagcttgtcgtagaaaacggtacggccagcgctggagtggatcaccttttcctgacggttgatggtaatcgcgcgttcgccgaccagtaccttgacgccgtgtttctcatagaacccttcgcgtaccagcgacagctcttccgcagtatgatgggagaagtaagacgacaggtggacacggtcataggcgatacgcggctcttcacagaacacggtaatgtcgaattgtccggcaggcgccttatcaagaagctcttcgataaagcgatggccgaccatgccgttaccgataatagcgattctgactttgctcatttttgcctcgatttcttttctattaccgcctaccttaacgattcagctactacactcattgatacaaatcaatttagaacttacctaccacttaatgagtatattcatgatttataatgatttttctaagtgatggaaaaatcaggcttttccgttctgttctttttatgtacaaaggcagcggaagaaataagcaatattcaggggagcaaactatgtcgacaacgccgctgtggttaattcagaacgtccatctgccaaagagggaagggttgtggcagattgcgattgataaagggcgattcggcgacatcacgccgatgggagaggcgcgcagcgagagctacgacgtgcttaacgcccgcggcggattggccatcccgccgtttatcgaaccgcacatccatctcgataccacgcagacggcgggagaaccgaactggaaccagtccggaacgttgttcgaagggattgagcgttgggcggaacgtaaagcgctgctgagtcatgaggatgtgaaagcccgcgcgtggaaaaccctacgctggcaaatcgctaacggcatccagtttgtccgcacccatgtcgatgtttccgacccatcgttgaccgcgctgaaagcgatgctggaagtcaaacaagaggtagcgccgtgggtcgatttgcagatagtcgccttcccccaggaagggattttatcctaccccaatggtgagagtttgctggaggaggcgttacggctgggcgccgatgtggtcggggcaatcccgcattttgaatttacccgtgaatacggggtggagtcgctgcatatcgccttccgtctggcgcagaaataccagcgtccgctggatatccactgtgatgaaattgacgatgaacaatcgcgctttgtcgaaacggtcgccgcgctggcgttaaaagagggaattggcccccgggtgaccgcgagccacaccaccgcgatgcactcctataatggcgcttatacctcgcggctgttccgcctgttaaaactctcaggcattaacttcgtcgccaatccgctggtcaatattcatctgcaggggcgctttgatgactacccgaagcggcgcggcgtgacgcgagtcaaggagctgatggcggccggcattaatgtctgttttggccacgatgatgtgttcgacccatggtatccgttgggaaccggcaacatgctacaggtgctgcatatggggctgcacgtctgccaactgatgggctatcagcagattaacgacagtctacagctgattacccacaacagcgccagaacctttgggctcaatgattacggcatcgctaccggcaacccggccaatctggtgatcttgccggcggaaaacggttttgaagccgtacgctgccaggtgccggtacgttggtcaattcgccagggaagggttattgcgactacgcagctggcgcagacgtggatacagaccgataaaggcggcgaggagttgttttttaccaaaaatagcccctttgccgaagcaaaggggcttaaggcttagtgcgccgacgcgttctgacggtggcgggaaacgaagccaaggagcagacacatcacgaataccacggcatagaggccgttcgcggtgtgcagcgcggccagcgcgccgctggccgcgacgatcggcccggtcaccacgaaggtcagcatggtgccgatggtgccgcaggtcagaatgaagttcaccagcttcggtgaagcgactttagtctgctgcgagcccagggtaatgatcgaggtataaatggcgctggagaagaagccaagggtcaggatgaaccacggcatatgctccggcgaaccgttaatgaacagatacatcaggactgtcgccaggcccgccagcacggtcaggatgcgctgcaggtcgaagaagcgcaggatgaagctgaacgaccacatgccgatcatataggacatccagaaatcgctgaccagcttaccggcgtcgccgaggctcatgccgaggcctttggcatattccggtacccaggagataaagcccaactggccgagtatgtagcacagcgcggcgatggaaaggaacagcacgccgatgccccatttctctttcactaccggctggctgttttccgccagcgctttgttgccaagcaccgggaactcacagccgaaagtcagcgcgaaaatagcaacgtagaccaggccgatacaggcgtaaacccagtaccactcgatgctgcgcgccagcagaacagcggcgaccatcgggaagatcatccctgccatgctgaagaaggagtcggtgaacagcagacgcgcgccgcgctggcggccttcatacatgtgggtaatcaggaaagtaccgatcgacatggtgatcccgctgaccagaccgagcacgaacatcgacgcggagaacagcgtcaggctgtggccgaacatcagtccggcgatagctaacagcatcaggataaagccgaagcgcagctgggttttcagcggcacgatctccatcagccaggcattgaggaagatagaaatcagaataccggcattgaggaaggtaaaggtgttactcatactggacaccggcagatggaaataatccgcgatgttccccatcaccatcccggtgacgatcaccaacgcgccggtcagggcgtaggagaaaaagctgatccatgtgagcttgatacgattgctgttagtcatgacaggcctgtgaatagataggtaaagcgcgttgacgctgcgccgggcgcacagattttattcattcaagtgatgaaggcaaacgtttatattgaaatgtagagcttattgcatggttttgtgtgacctagatcacattaataagattgctcacccctgagtcagttcgtaacaagtgtttcagctaagtaaaattaggtaaaaggctagcccgctatgcaaaggctctttagaatcaaggcacttgctttttactctgctccgttaaggaatttccatgctcaaatccactctggcggcgatggctgccgtattcgccatttcagcattctcccccgccatggcggccaagggcgacccgcacgtactgctgaccacttctgctggcaacatcgagttggagctgaatagccagaaggcgccgatttctgtcgataacttcctgaagtacgtgaacagcggtttctataacaacacgaccttccaccgggtgatcccaggctttatggtacagggcggcggctttaacgagcagatgcagcaaaagcagccgaacccgccgattaaaaacgaagccgacaacggcctgcgtaatacccgcggcacgatcgccatggcgcgtaccgccgaccaggacagcgcgaccagccagttcttcatcaacgtggctgataatgccttcctcgaccatggccagcgcgattttggctacgcggtatttggtaaagtggtgaagggaatggacgtcgccgacaaaatttctcaggttccgacccacaacgtcggcccgtaccaaaatgttccgtccaaaccggtcgttattctctcggcgaaagtgctgccgtaatcctcttctggcgcgggcggttcgcctgcgcccagcttgcctctctgcgtaacctgaaattgctgcttatacttgtggcacacaggggacgacaagggaggcgaccatgcgtttactcaccgataaacaaaaatcccggctctgggaacagacccgcaatgccaattttcaggccagccgacgccttgaaggcgcgacggtaccgctcattaccttgacggctgaggaagcgctggcgcgtcttgccgagctgaggaggcgtcatgagcgctaaatatggtgacgatcgcgacccctatctctatccgacgctggatgtgttgcgtaatcggctgggtattcgtcagacacagcggctggaacaaacggcctgggaattcacttccctgcgcgcggcggcgatcccgttgggcccgcgcggccgtggcttaccgcatctgtgcgccattcaccggcaactttatcaagatctctttgactgggcgggcaaactgcgggaaatcgatatctaccagggcgatacgccgttttgccacttcgcgtggatagagaaagagggcaacgcgctgatgcgcaagctggaagaagaggactatctgtgtgaactcccctgggagaccttcgtcgagcgcctgagctggtattacggcgaaatcaatgtcctgcacccgttccgccttggcaacggcctgacgcaaaggatcttcttcgaacagttggccattcacgccggctacctgcttgactggcggggcatcgatccggatgcgtggagccaggctaaccagctgggcgcgatgggcgacccggaaccgctggagcggatctttcgtaaagtggtaagcgaagcgcgggaatctgagtagaatagcccggttttgttttttccggagccgctatgatcctgctaatcgataactatgactctttcacctggaatctgtaccagtacttttgcgaactgggggcggaggtgctggttaagcgtaacgatgagttaacgctggcagagatagcgtcgctggcgccggagaaaatcgttatttcgccgggcccctgcacgcccgatgagtcaggtatttcgctggacgttatccgccgctatgccggtaaaactccgctgctcggcgtgtgtctgggtcatcaggctatcgcccaggtcttcggcgccgccatcgtacgcgccgcgcaggtcatgcatggtaaaacgtcgcttattgagcacaacggcgagggcgtttttaaggggttaaacaacccgctcaccgttacgcgttaccattcgttagttatcgacccgccaactcttcccgcggattttatcgttaccgcccgcagcgccagcggtgaaatcatgggtatccgccatcgccagtgggatctcgaaggcgtgcagttccacccggagagtattcttagcgaacagggacaccaactactggaaaacttccttaaacgctgatttgtagttgccatgaagtgatttattatgcatattttgtgattaaaacatcgcaatcattgcacattacacagaaggatgggcatcacatggcaacagagcaaccggcgatcacccgcgccacattcgatgaagtcattctgccgatttatgcaccggcggaatttattccggtgaagggaaaaggcagccgcgtttgggatcagcagggtaaagagtacgttgattttgccggcgggattgcggtgaccgcgctgggccactgccacccggcgctggtggcggcgctgcacgagcagggcgaaaccctgtggcacaccagcaacgtttttaccaacgaaccggcgctgcgcctgggtcgtcaactggtggacgccacttttgccgaacgcgtggtgtttatgaactccggaacggaagccaacgaaacggcgttcaagctggcgcgtcattacgcaatcactcgccatagcccgtacaaaaccaaaatcatcgctttccataatgctttccacggacggtcgctgttcaccgtctcggtcggcggtcagccgaaatactctgacggtttcgggccgaaaccggcagatatcgtgcatgtcccatttaacgatctcgaggcggtgaaagcggtgatcgatgaccatacctgcgcggtggtggttgagccgattcagggcgagggcggggtaatggcggcgacgccagcgttcctgcaggggctgcgcgaactgtgcgaccagtatcaggcactgctggtatttgatgaagtgcagtgcggtatgggccgtaccggttcgctgttcgcctatatgcattacggcgtgaccccggatatcctgaccagcgcgaaagcgctcggcggcggtttcccgattagcgcgatgttgaccaccaatgaaattgccagcgccttccatgccggttcccatggctccacctacggcggcaatccgctggcctgtgcggtggcgaccgcggctttcaacctgattaacacgccgcaggtgctggagggcgtgaatgccaaacgggcgctgtttgtcgaacacctgcagcagatcgatgcgcagtttgatctgttcagcgacatccgcggcatggggctgttaatcggcgctgcgcttaagccgcagcatcatggacgcgcacgcgattttctctatgccgcggcggaaaccggggtgatggtgttaaacgccgggccggatgtgatgcgctttgtaccatcgctggtgattgatgatagcgatattgccgaagggatggcgcgcttcgcgcaggcggttaaaaacgtgcttagcgcttagtcgtgcgtagccagatgccgtgatgcggacgctgacgccatgccaccgacgaaatggtgtgcatggtgttcagatggccgaggatccgctgcagatgctgctcaagggtgctgagcggcccacgcaacacttccccatcctgggattccataatattcacatcgcccgcgctgcccggcccgtctgaatccagacgctgctgacagcgctgcagggcaatttcacaagattccagatatcgctgcgccaggtcaggcgttagcatcgtatgctcgcgcgccagcgtggtcatggcgttgatatgctcaacgataaactggctatgggttacccacagtttcatatcttccagatagtgcgagttaaagcccggttcctgcatcgcctggttaagcgagttatacagggcgttgtgcgcctggtttacgcgcatacgttggtaggccaacgccggggcctgcggatcggcgctaaggatcagccgaatcgcctcctgatcggcctccagggcatcgtgggcgtttttacgcagcaggccgctctgccattgcggccatagccagaccatcccgccaaaggcgatcagacagccaatgatggtatcgataaagcgggcgacgatgaactgctcgccgttaagcgtaagcaactgcagggtatataccgcggtaacggtaaagcccaccatcgcccagccgtagtgtttacggatgatgagatagctcagcagcgtgatgaacaacataccgcttaacgtatagctctccggtacgtggaagtgtagggtcagccaggcgatcaccaggcccgccagggtgcctgccgcccggtggacaatccgcacgcgggtggcgccgtaaccgttttgcgtcacgaacagcacggtcatcaggatccagtaaggcttcggcaggtgcagggcgctgcccatcaggctggcgatgctcaacattacgctgatgcgcgcggcgttgcgcagcgccggggatttcaatgacaggtagttcttcagggccggtagcagcggcaggcgtcgttctttgtccgccatcaggttacgtgcgtacagcgggcgctgagtacgtagcacgcgggcgatacgactgaagtgccaggcgcagaactggccaaccgggttatcggggtgctgataagcgattttttccagcgcgccgatttgcttatccatctggaagcggcgcgggtagcgatggtagagaatatcatccgccagcacccgcagacgcgcggcgacggtctgcgcgttccagcggatgaccgcttccgcatggctgcgctccaccagtttttgcacctcttccggctggtgcaggctcactgaaatatgttcctgcagatccagcccaacctggaacgcgcgcagtagtcgcttatgatcgctacgctggttggcggctaacatatgcatctgctgatagcactgggtaattaaatcgaccaccttctgctggcgggtaagcagcggcggcagggaggtcgtcgggtcagtgtgctgcgtcaggaggctatatttggcctcgcaataattagccaattcgcggtaaagcaggcttaacgactcgcgcagcggttgctcccgccagagccaaaaccagaaccagttaaagagtccgtaccacaaggttcccagcgcatagataagcagcggctcccagatgggcatattgccggccaggcttaaagtaaaaatggcggcgataagcgatgccggtaacaggcgagcgtgtagcgaactgatttccgccgtcacgccgagaatcagcgccagcgcgctgaggataagcggcaaagggatgtcccgcgccagaagcaattgcacaatcaagctgctgccggcaaacaggcaaccgccaacgatcaggcgtttgaaaaaacgtttatgcggggtgtcgagaccggcaatattgcaacaggcgggaactaaagagaacagcagcccctgctgcagatggccgagcagaagcccgatggccacaggtagacacagcaccagcgtttgccgcagtgcatagttgacttccggatggtaaatcagcctgcgccacatgggagaaacaaaaacggcgtactgcgcgaagcaatacgccgtttagcgacttaacgggtaccgtagacgacgatagttttaccgtgtgcggagatcaggttttgatcttccagcatcttcagaatacggccgacggtttcacgagagcaaccgacgatctgaccaatttcctggcgggtgattttgatctgcatgccgtccgggtgggtcatggcatcaggctgtttcgccagattcagtaaggtctgagcgatacggcccgtcacgtcgaggaaagcaaggttaccgactttctcggaagtgacctgcagacgacgcgccatctgcgaagaaaggcgcatcaggatgtccgggttcacctggattaactgacggaattttttgtaagagatctcggccacttcacatgcggttttcgcacgtacccaggcactacgttcctggccttcttcaaacaggcctaattcaccgatgaaatcgccctggttgaggtaagagaggatcatctctttaccttcttcatccttgatgagtacagccacggagccttttacgatgtagtaaagcgtttccgctttctcaccctggtgaatcagcgtgctctttgatgggtacttatgaatgtggcaatgagacaagaaccattcaagggtagggtctgtttgcggtttgccaagcaccatgcgcggttatcctctgttataagctatctccggacaccgacactacacggcatccgggcatgcaatcgtatttttccctatgcctgggaagctggctgctcaatttatgcagcctgtaatgtgaactcctcagcatacatgcggtacatcaatgtattactgtagcatccagactgttttagcatagctttcaccgcatgtctcctggtgtctcgcttcagcatgacccaggtcgccttccgttgcgagatttgttatgtgcgcgtaatctgtcaggaaaattgcaacagcggagttaaattttatgcaagcgcgtgtgaaatgggtggaaggtctaaccttcatcggtgagtcggcctccggccaccagattttaatggatggcaactccggggacaaagcgcccagcccgatggagatggtgttaatggcggcgggcggctgtagcgcaattgacgtggtgtctatcctgcaaaaagggcgtcaaaacgtcactaactgcgaagtgaagctgacctccgaacgccgtgaagaggcgccgcgcctgttcactcatatcaatctgcactttatcgtcaccggtaaagagctgaaggatgcggcggtgtcccgtgcggtggatttatccgcggagaagtactgctcggtggcgttgatgctggaaaaggcggtcaacatcacccactcttacgaagtcatcgaagcctgaggcgaattgacgtagcgggacactaaccccggcagcacggcgaccggggttttattttgctcttaactaatggttttgccttccatcaagcgctcgaccagcggcgccataatgagctccatcgccagccccatcttaccgcccggcaccaccagggtgttcatatgcgagataaacgacccctgtagcatcgccaacagccagggataatcaatcccctgcaaattgcggaagtgaatcaccacgaagctttcgtcgagcgatggaatacctttggcggcaaacggattcgaggtatcgaccgtcggcacgcgctggaagttgatatgggtacgtgagaactgggggtgatgaaattgatgtagtcctccatcgaacgcaccactgagtccatcaccgcttcgcgcgaatggcctcgttcgctggtatcgcgaatgagcttctgaatccattcgaggttgacgatcggcaccactccgaccagcaggtcgacatgtttcgccacgtcatgctgcggcgtcaccacgccgccgtgcagcccctcataaaacagcacgtcggtcggttcaggcagcggctgccacggggtaaaggtgccgggaacctgattccagggaaccgcttcatcataggtatggagatattttcgcgactggcccttgccgaattcgccgtactctaaaaaggtgcgttcaagcaagctgaagtcgttggcttccgggccgaagtagctgatgtgtttgccctgatcgcgcgctttgcggatcgccatgtccatttccgggcgagtatagcgatggaagctatccccttcgacctccgcggcatgtaggttcagttgcgagaagattttgcgaaacgcgaggctggtggtggtggtgcccgcgccgctggagcccgtgactgcgatcactggatgtttggcagacataacaactccctgattaagtgatggtgtgtcgccgtatcgcgccaggctctcgcggtgagaggggcatggcgcttagccgttaaacatcttgcgggcatgatgttgaccgtctcgtgcagttctgaccataccagcacggcctccccggttttaagctgctgttttacatcggcgactttatcggcaagcgaacgttcatgttcaccataatcggtgccttcgcgcaacacaaagctttcaatcagattatccagcgtttcgggatcgagatcctgccagggaataatcatgcttgtcctcccagccagcgggttaaccaatccggaatacgttgctccagccacatttgcggttttcgcagcgtaccgccgacaaagccaacgtggccgccttgttccgtgagctgatattcgacgttagccggcagctgttcctgcggcggtattgaatgatggtccataaatggatcgtcttttgcgtgaatgatcagcgtcggcttggtgatatcgcttaagcgcggcatcgcgctgcactgtcggtaatagtctagcgcatcggcgaaaccgtggattttggcggtgatcatgtcgtcgaattcgcggatgcggcgcatgcttttgagctggcgaagatccaccggcagcgagcctggataggctttcagcttgcgcgaggcgttggctttcagcaggttgagcaggtaacgctgatagacgcgcgaaaatcctttatccatatggtagctgcaggcttccagcataaagggcgccgagacaatcacggccgcatcgagcggaatattgtcgccttctttcgccagcagacagcccagcatgttgccgccaagcgaatagcctaccgccgccgtcggtgcggcgccgaattcacgctgcaaccagtgcaggaaccaggtgccgtcttccgtttcgccagagtgataaatacgactgttgcgattcggctcgccgctgcagccgcgaaaatgcatcaccacccgagccagccgcgctgcatggcggcgtgaattaaaccgtgggcgtaagggctgtgcaggctgccttccagaccgtgaaagaccaccagtcgcggtttgtggcgcgcgccggcagggtcttcgctccaggccagatcgacgaaatcgccatccggcagctcaaggcgctgccagtgcggcgtaaatcggagcttgcggcggatgatccgcggcagcatggtttgcagatgacgattacccacgccgcgcatcggatggaattcgcgcgaatcgttatcgggggcgtcactgctgtcggggttatttcaaccatagtaccaggattattaagaaacttttagaacactataccgcgcataaaagtgggcggttagccaatatgtggtcttgcgggtaatcggtatagattacatgaaaatgattcaagagaatggctgagcgatgaatttcggaaagtctcccgggatacctaagcagaaactcccgacgatgaattttctctcaccgccgggcggttactccttaaccttcctgcagcatccgttccagctgttcctgcgcgtccagccacgccatctcacactcttcgagccctgatttggcgctcgcctgctgctgcaggcacgcggttaattccgctttgcgcgaggcgtcatataactcgctgtcgcccagtttctcttccgcctgcgccagctgcgcgttgagtttatccatctctttttccagacgggcgatctctttacgcagcggttgcgtttgcgtgcgcagttcggcttcgcggcgtttttgatccttacgcgcctgcgcgctattgccgttatccttcggcgcttcagaggtttggttttcctgcttctgcgaatcactcagccactgctgataatcttccagatcgccatcaaacggttcgactttaccgtcgtgaacaaggtacaaatcgtcagtggtggagcggatcaggtggcgatcgtgcgagacaacgaccagcgccccttcgaagtcgatcagcgcttcggttaaggcctgacgcatatcaagatcaaggtggttggtcggttcatcgagcagcagcaggttagggcgctgccagacgattaacgccagcaccaggcgcgctttttcgccgccggagaaacggcgggtttcttcgctgactttatccccctggaatccaaagccgccgaggtagtcgcgcagtttttgttccagctcctgcggcgccaggcgggccagatgctgtatcggcgactcatcggcgcgcaggaattcgagctgatgctgggcgaagtaaccgagcttaatccctttcgccaggccaatttcaccggacagcggcagtaactcaccggccagcagcttaatcagcgttgatttaccggcgccattgcgccccagcagaccgatacgcgaaccgggcaccagattcagcttgatggagtcgagaataatccgttcgccgtagccggcgctgactttctccatcttgagtaacgggtttggcagactttccggcgcgcggaagctgaagtggaacgggttatcgacgtgcgcggggcgataagctccatgcgctcaagcattttgatacggctctgcgcctgcttcgctttggtggccttggcgcggaagcggtcgatatagctctgcaagtgggctacgcgctgctgctggctttcgtacatggcctgctgctgcgacaaacgggtcgcgcgctggatttcaaacgagctgtagttaccggtgtattcgaacatcgtttgctgttcgatatgaataattttatcgacgatcggatcgaggaaatcacgatcgtgagaaatcaggatcagcgtaccggtatagcctttcagccacttttccagccagatcaccgcatcaagatcgaggtggttggtcggttcgtcgagcagcagcaggtcggaacggcagatcagcgcctgcgcgaggtttaagcgcatacgccagccgccggagaaatcactgaccgggcgctcaagctgctcgttactgaaaccaaggccgtgtagcaggctggcggcgcgggaacgaatcgtccaggcgtcaatggcatccagcttaccgtggacggtagcgatagcatggccgtcgtcgcgctcattggcctgctgtaaatcggcttccagcttgcggaactcgcgatcgccatcaataacataatcaatagccggttgcggcagcgccggcgtttcctgattaacccacgccagctgccagttgctcgggaaggtcatggagccgccgtcggcgcttatctcgtttttcaaaagcgaaagcaacgtagatttaccgcagccgtttttacccaccagaccgaccttctggccaggattgatggtggcggtggcgttgtccagcaggacgcgtacgccgcgacgaatttgtaacgaggagaaaacaatcataaggcgccgtatgttcagactatgttaatttgtctttatgataatgtagtgtggaagcgaaacgctccattgggccgcaatggtagcccaaaatgaagacgatagacaaagtcattctggttgcgtcgagacgcagccgcttcgcaagccgccagatgacgttcgggaggggaatgatgtctcagacagcgaaagtgttgctgctgtatgcccacccagaatctcaggattccgtggccaaccgggttttgcttgaaccggccttacagttgccgaatgtcaccgtgcacgatctttatgcgcactatccagatttttttattgatatcgcccatgagcaggatctcctgcgtcagcaccaggtgattgttttccaacatccactgtatacgtggagctgcccggcattgttgaaagagtggctggaccgggtgctgagccgcggcttcgccagcggcgcgggaggaaatcaactggcgggaaagtactggcgtagcgtgatcaccaccggcgagccggagagcgcttaccgccgcgatgctaatcgctatccgatgaatgatattctgcgcccttttgagttaacggccggcatgtgccgcatgcactggctgagtccgattattgtctactgggcgcgccgacagcggccggaagatttgcaaagccacgcccgcgcatatcgcgattggctcgcgaatcctgttgctacaggaggcgtcaatggcgggagctgatttgctattagcaggggtactgtttttgtttgccgccgtggtggcggtaccgctggcggcccggctgggcattggcgccgtgctcggctacctgctggccgggattgcaattggcccgtggggcttggctttattagcgatgtggatgaaattctccatttttccgagctgggcgttgtattcctgatgttcatcatcggccttgagcttaatccggccaaactgtggcaactgcgcaactcgatattcggcgtcggcgcggcgcaggtgctgtttagcgcggcgatcctcggcggattgctggtggtcaccgggttttcgtggcaggcggccgtggtgggcggtattgggttagcaatgtcctctaccgcaatggcgctgcagctgatgcgcgagaagggaatgagccgtaacgaatccggccagttgggcttttcagttctgttatttcaggatttagcggtgatcccggcgctggcgctggtcccgctgctcgccggacacggcgacgataacttcaactggatgtcggtggggatgaaggtgctggctttcgccggcatgctgattggcggccggtttctgctgcgcccggttttccgctttatcgccggttccggcgtgcgtgaggtctttaccgccgccacgctgttgctggtgctgggctccgcgctgtttatggacgccctggggctgtcaatggcgctggggacgtttatcgccggcgtgctgctggcggaaagcgaatatcgccacgagctggaaatcgctattgagccgtttaaaggcttgctgctggggctgttttttatctccgtcggcatggcgctgaatcttggcgtgctctacacccatttgctgtgggtcgcgctaagcgttgccgcgctggtggcggttaaagcgctggtgctttatgtattggctcgggtatatggtttgcgcagctccgagcgcacgcagttcgccggagtattgagccagggcggcgagttcgcctttgttctcttttccatgccggcttcgcagaagctgttccataacgatcaaatggcgctgctgctggttaccgtaaccttatcgatgatgaccacgccgctcctgatgaaggtcattgataaagtgctgtcgcgacggcttaacccggcggaggatgccgatgaggcgccatgggtcgaggatgataagccgcaggtgattatcgtcggcttcgggcgttttggtcaggtgattgggcgtctgctgatggctaataaaatgcgtataaccgtgctcgaacgcgatatcagcgcggtcaatctgatgcgcaaatatggctataaagtctatttcggcgatgcgacgcaactggagctgttgcgttcggcgggtgcggaagaggcgcagtcgatcgtgattacctgcaacgagccggaagataccatgaagctggtggagatgtgccaacagcattttccccacctccatattctggcgcgtgcgcgagggcgcgtagaggcgcatgagttattacaggcgggcgtgacgcaattctcgcgagaaaccttctccagcgcgctggaattgggacgcaaggcgctggtgaccctgggaatgcatccgcatcaggcgcagcgcgcgcagttgcactttcgacgcctcgatatgcgaatgctgcgcgagttaatgccggtgcatactgataccgtacagatatcccgcgtgcgggaagcccggcgcgagctggaagagatttttgagcgtgaaatgcagaaagaaagccgacagctggacggctgggacgagtttgaatagaaggtagagcaaaatggcggtacgtaaacgttttattgccggcgcaaaatgcccggcgtgccaggcgcaggattcactggcgatgtggcgcgagaataatgtcgatattgttgagtgcgttaagtgcggacatcagatgcgcgaggccgataaagaggtccgcgagcacgttcgtaaagaagagcaagtgatcggcatttttcatccggactagcgttatctgtcgcctttttttaagctaaagggtacacggctgcagaattccgctacaatctgcgccactattcttcccatgctcaggagatatcatgaaagtagcaaaagacctggtggtcagcctggcctatcaggtacgtacagaagacggtgtgttggttgatgagtctccggtgagtgcgccgctggactacctgcatggtcacggttccctgatttccggcctggaaaacgcattaaatggccacgaagtgggcgacaaatttgatgtcgaagtcggcgcgaatgacgcgtacggccagtatgacgaaaacctggttcagcgcgttcctaaagacgttttcatgggcgttgacgaactgcaggttggcatgcgcttcctggctgaaaccgaccagggtccggtaccggtagaaatcaccgaagtcggcgacgatttcgtggtggttgacggcaaccacatgctggctggccagaatctgaagttcaacgtagaagttgtcgccctgcgcgaagccactgcagaagaactggagcacggtcacgtacacggcgctcatggccacgatcacgatcatgaccacggtcatgacggttgctgcggcggccacggtcacgatcatggtcacgaccatgaacatggcaaaggtggttgcggtaacggtggttgcggttgccactaatggcgtcgcgttcgcgcgaatagccaaaaaagcggggaaacccgctttttttacgtctcaataatgcggaggcggcgtctcttcagactgtgacgcgatgtgcgacggctgtgtcgctttcaatttttcgatcatcaagcgcatatgctcgcgcattttggccatttctatttcatgcgccgtgacggttttgttgaggtcctcgatggtgatctcctgaaacgccagtcggctttccagttccgccagacgcgtctccattgtgctatcgttcataggtcgcctcttctgtcttgtttgcgggcggattctactcaagtttccgcgttaacgcagcatcgtaacgtcagagaggaaactaattcatacaaaaatagtctgaaatgaggcgatattcaggtaggtccgtatgtagatttgttctgcaacgttctatagtacgttttttgctttttatgataaccctggggtgagatgccccggccctggagaaatggatgaaatcactgtttaaagtaacgctgctggcgaccacgatggccgttgccctgaatgcaccgctgacctttgctgccgatactgcagcgaaagctgcaccggcggcggacagcaaatcggcatttaaaaatgacgatcaaaaatccgcttatgcgctgggtgcatccctcggccgttacatggaaaactccctgaaagaacaagagaagctgggtatcaaactggataaagaccagctgatcgccggtgtgcaggatgcgtttgccgataagagcaaactgtccgacaaggaaattgaaaccactctgcagtcttttgagacccgcgtgaaaaccgctgctcagcagaagatggaaaaagacgcgactgagaatgatgccaaaggcaaagcgttccgtgacgccttcgctaaagagaagggcgtgaaaacctctaaatccggtctgatgtataaagtcgagaaagccggtaccggcgatgcgccgaaagacagcgataccgttgtggtgaactacaaaggtacgctgatcgatggtaaagagttcgataactcttacacccgcggcgagccgctctctttccgtcttgatggtgttatccctggctggactgaaggcctgaaaaacatcaaaaaaggcggaaaaatcaagctggttatcccaccggatctggcttacggcaaaactggcgttccgggtatcccggctaactctacgctggtatttgatgtagaactgctggacatcaaaccggccccgaaggctgatgctaagccagaagccgctgccgaagcaccggctgcagacgctaagaagtaatctgccataagccgccgccttcagggcggcggcttttttattggctgcagatataattaaaactggaaaattcctcaggcgctgtattactttagatagcttaataatgatgatgagcctgccctgacgataacgacaggctcctgaaaaggagtgcttttttacatgtccaggtcgcttttaaccaacgaaaccagcgagcttgacctgctggatcaacgtcctttcgaccagaccgacttcgatatcctaaaatcctatgaagcggtggtggacgggttagcgatgctcattggctcccactgtgaaatcgtgctgcactcactgcaggatttaaaatgctccgctattcgtatcgctaacggtgaacacaccggccgccaaattggctcgcctattaccgatctggcgttacgtatgctgcacgatatgacgggagcggatagcagcgtatcgaagtgctattttacccgcgcgaaaagcggcgtgctgatgaaatcggtgacaatcgccattcgcaaccgtgaacatcgggtgattggtctgctttgtatcaacatgaacctcgatgttccgttctcgcagattatgagcactttcattccgccggaaacgccggaagttaactcgcaggtcaacttcgcctcatcggtagatgacctggtcgcacaaacgctggagttcaccattgaagaggtgaatgccgatcgtaacgtatcgaataacgcgaaaaaccgccaaatcgtgttaaatctttatgagaaaggcatcttcgatatcaaagatgcgattaaccaggtagccgatcgcctgaatatctctaaacacacggtgtacctctacatccgccagtttaaaagcggcgatttccagggactcgataagtaatgcgttttgccatcaccgtaaccgggcctgcctacggtactcagcaggccagtagcgcgtggcagtttgcgcaggcggttattaacgcagggcatgaactggcctgcgtgtttttctatcgcgaaggggtctacaacgccaatcagctgaccgcccccgccagcgatgaggttgatttggtgcgacactggcagcgcctgcatgatgaacatgccgttgcgctgcacatttgcgtggcagcggcgctacgccgcggcgtgaccgatgaacgcgaagcgcagcagcttggtttgccggcgcataatctgcagacgggatttaccttaagcgggttaggcgcgctggctgaagcgtcgttaacctgcgatagaatggtgcagttctgatgaaacgcgtggctttcgtattttcttccgcgccgcacggcagcgcagccggcagggaagggctggacgccttactggcgacctcggcgcttaccgatgacctcggcgtcttttttgtcggcgacggcgtgtttcagattatccctggccagcagccgggaaaaatcctcgcccgtgattatatcgccaccttcaagctgttatcgctgtatgacatcgaacagtgttggttatgcgcggcttctgcccgcgaacgcggcctggccgccgatacgccgtgggtggtggatgtagaaagcctcgagccagaagcgctgcgcgcccggcttgatgaattcaacgtgattttacgattctgaggcccagatgttccacactctaagcgtctctccctggcatgtcgatatcgacgcgatgctacgtctggtgaagccaggcgatgatctgctactgctctctgatggcgtggtcgcggcgattgacggcggccgtttccttgaaatcctgcaatccgcccccataaccctacatgctctgcaagacgatatcgaagcccgcgggctggctggtcaaattgcggacagtgtcgtcagggttgactatactgatttcgtcagtcttacggtcaaacatgaaggtcagttggcctggtaatggcgggatcgttgtatatttcttgacaccttttcggcaccgccctaaaattctgcgtcctcatattatatgaggcgatttattacgtgtttacgaagcaaaagctaaaaccaggagctatttaatggcaacagttaaccagctggtacgcaaaccacgcgcgcgcaaagttgcaaagagcaacgtgccggcgctggaagcctgcccgcagaaacgtggcgtatgtactcgcgtatataccaccactcctaagaaaccgaactccgcactgcgtaaagtttgccgtgtgcgtctgactaacggtttcgaagtcacctcctacatcggtggtgaaggtcacaacctgcaggagcactccgtgatcctgatccgtggcggtcgtgttaaagaccttccgggtgttcgttaccacaccgttcgtggtgcgcttgactgctccggcgttaaagaccgtaagcaggctcgctccaagtacggcgtgaagcgtcctaaggcttaatggttctccgttaagtaaggccaaacgttttatattaatgtcaaactaaactctttgagttttggacaatcctgaattaacaacggagtatttccatgccacgtcgtcgcgtcattggtcagcgtaaaattctgccggatccgaagttcggatcagaactgctggctaaatttgtaaatatcctgatggtagatggtaaaaaatctactgcagaaactatcgtatacagcgcgctggagaccctggctcagcgctctggtaaaactgaactggaagccttcgaagttgcgctcgaaaacgtgcgcccgactgtcgaagttaagtcccgccgcgtaggtggttctacttatcaggttccagttgaagtacgtccggttcgtcgtaatgccctggcaatgcgttggatcgttgaagctgctcgtaaacgcggtgataaatccatggctctgcgcctggcgaacgaactcactgacgctgcagacaacaaaggtactgcagttaagaaacgtgaagacgttcaccgtatggccgaagccaacaaggcgttcgcacactaccgttggtaatcccttcggagtcatagtcaccaggcgggcgtttcagatgagtcgcccgctctggataacttaactgaacgcctaaagaaataaacgaggaatcaaatggctcgtacaacacccatcgcacgctaccgtaacatcggtatcagtgcgcacatcgacgccggtaaaaccactactaccgaacgtattctgttctacaccggtgtaaaccacaaaatcggtgaagttcatgacggcgccgctaccatggactggatggagcaggagcaggaacgtggtatcaccatcacttccgctgcgactactgcattctggtctggtatggctaaacagtatgaaccgcaccgtgtaaacatcatcgacaccccggggcacgttgacttcactatcgaagtagaacgttccatgcgtgttcttgatggtgcggtaatggtttactgcgcagttggtggtgttcagccgcagtctgaaaccgtatggcgtcaggcaaacaaatataaagttccacgcattgcgttcgttaacaaaatggaccgcatgggtgcgaacttcctgaaagttgttggtcagatcaaaacccgtctgggcgcgaacccggttccgctgcagctggcaattggtgctgaagaaggtttcaccggtgttgttgacctggtgaaaatgaaagccatcaactggaacgatgcagaccagggcgttaccttcgaatacgaagatatcccggctgacatgcaggacctggctgacgaatggcaccagaacctgatcgagtccgctgcggaagcttccgaagagctgatggaaaaatacctgggcggtgaagaactgactgaagaagagatcaaaaaagctctgcgtcagcgcgttctgaacaacgaaatcatcctggtaacctgtggttctgcattcaagaacaaaggtgttcaggcgatgctggatgcggtaattgattacctgccatccccggttgatgttccggcaatcaacggcatcctggacgacggtaaagataccccggctgagcgtcacgcaagcgacgacgagccgttctctgcactggcgttcaaaatcgctaccgacccgttcgttggtaacctgaccttcttccgtgtgtactccggtgtggttaactctggtgataccgtactgaactccgtgaaagctgcacgtgagcgtttcggtcgtatcgttcagatgcacgctaacaaacgtgaagagatcaaagaagttcgcgcgggcgatatcgctgccgctatcggtctgaaagacgtaaccactggtgacaccctgtgtgacccggatgcgccgatcattctggagcgtatggaattccctgagccggtaatctccatcgccgttgagccgaaaaccaaagctgaccaggaaaaaatgggtctggctctgggtcgtctggctaaagaagacccgtcattccgcgtatggactgacgaagagtctaaccagaccatcatcgccggtatgggtgaactgcacctcgacatcatcgttgaccgtatgaagcgtgaattcaacgttgaagcgaacgtcggtaaacctcaggttgcttaccgcgaagcgattcgccagaaagttaccgatgttgaaggtaaacacgccaagcagtctggtggtcgtggtcagtacggtcacgttgtgatcgacatgtacccgctggagccgggctctaacccgaaaggttacgagttcatcaacgacattaaaggtggtgtaatccctggcgaatacatcccggccgttgataaaggcatccaggaacagctgaaagctggtccgctggctggctacccggtagttgatatgggtatccgtctgcacttcggttcttaccacgacgttgactcctctgagctggcgtttaaactggccgcttctatcgcctttaaagaaggctttaagaaagcgaaaccagttctgcttgagccgatcatgaaggttgaagtagaaactccggaagagaacaccggtgacgtaatcggtgacttgagccgtcgtcgcggcatgctgcgcggtcaagaatctgaagtaactggcgttaagatccacgctgaagttccgctgtctgaaatgttcggatatgcaactcagctgcgttctctgaccaaaggtcgtgcatcatacaccatggaattcctgaagtatgatgatgcgccgaacaacgttgctcaggccgttattgaagcccgtggtaaataatccacaggattaaaacctaagtcccgtgctctctcctgagggagagcactatagtaaggaatatagccgtgtctaaagaaaaatttgaacgtacaaaaccgcacgtcaacgttggtactatcggccacgttgaccatggtaaaactactctgaccgctgcaatcaccaccgtactggctaaaacctacggcggtgctgctcgcgcattcgaccagatcgataacgcgccggaagaaaaagctcgtggtatcaccatcaacacttcccacgttgaatatgacaccccgactcgccactacgcacacgtagactgcccgggccacgccgactatgttaaaaacatgatcaccggtgctgctcagatggatggcgcgatcctggttgttgctgcgactgacggcccgatgccgcagactcgtgagcacatcctgctgggtcgtcaggtaggcgttccgtacatcatcgtgttcctgaacaaatgcgacatggttgatgacgaagagctgctggaactggttgagatggaagttcgtgaactgctgtctcagtacgatttcccgggcgacgacactccgatcgttcgtggttctgctctgaaagcgctggaaggcgacgcagagtgggaagcgaaaatcatcgaactggctggcttcctggattcttacatcccggaaccagagcgtgcgattgacaagccgttcctgctgccgatcgaagacgtattctccatctccggtcgtggtaccgttgttaccggtcgtgtagagcgcggtatcatcaaagttggtgaagaagttgaaatcgttggtatcaaagaaaccgcgaaaaccacctgtactggcgttgaaatgttccgcaaactgctggacgaaggccgtgctggtgagaacgtaggtgttctgctgcgtggtatcaaacgtgaagaaatcgaacgtggtcaggtactggctaagccgggcagcatcaagccgcacaccaagttcgaatctgaagtgtacatcctgtccaaagacgaaggcggccgtcatactccgttcttcaaaggctaccgtccgcagttctacttccgtactactgacgtgactggtaccatcgaactgccggaaggcgtagagatggtaatgccgggcgacaacatcaaaatggttgttaccctgatccacccgatcgcgatggacgatggtctgcgtttcgcaatccgtgaaggcggccgtaccgttggcgcgggcgttgtagctaaagttctgggctaattcgttagctttgaataaaaaagggcgcttcggcgccctttttgctgtctatgatttggtgataagccgcgatggtttaaatattcataaagtgcgccgacagggataattaataaacagtctattgtaatcataactattctcatttaaactttgtgcataaattgaacgggagtttatatgtacgtttgtttgtgcaatggcgtaagcgataaaaaaatccgtcaggttgtgcggcaatttcaaccgcaatcttttcaacaattacgcaagtttattcccgttggaaatcaatgcggtaagtgcgtccgcgcggcacgtgaagtgatggaagatgaattaaccagcatgccggaattcaaagaaatcgcctgatcgcgactcttctctttttgacatccttatagcccggactacgcttcaataagtggaagcggagggactttataatgaaaggtgatgtcaaaatcataagttatctcaataaattattgggaaacgaactggttgctattaaccagtattttcttcatgcaagaatgttcaaaaactggggcctgatgcgcctcaatgatattgaatatcatgaatctatcgatgaaatgaaacacgccgataagtacatcgagcgtattttgtttcttgaagggctccctaacctgcaggatctcggcaaacttggcatcggtgaggatgttgaagagatgttgcagtctgacttaaggttggaactggaaggcgcgcaaaacctgcgcgaggcaatcgcctatgccgacagcgttcatgattatgtaagtcgcgatatgatgattgaaatccttgccgatgaagaaggccatattgactggctggaaacagagctagatttaattggtaaaatcggtctgcaaaattaccttcaatcgcagatcaaagtgtcagactagcgaacgtctgccacccgcaccaaaaacccgctgcagtcagaaatggcccaaacggcagcgggttgttcaaatcccatcgttgttgcctcctcctcctgagcagcgccaatgtcacccatgtcatcccggcaaacagagaagcgaccaataccaactgcggcaacctttgccagccgtgccaggcgccgagggcggcaagatatttaacgtcgccgtaccctagtccctcatatccgcgaagcccgcgatatagccaatagagtagggcaaaaaaaagatagccggcaattgccccccagacggcatcttctaaccgctgcggcgccagacacaggtaaaaaacaagaccgctccacagcaggggcaggtgagcctgtcgggaagaagaccgtgaaacaggtcctgacggcacagcgcaagggttaatccacagtagcaaagtaagaaggggaggacggtgagcatggagcactcctgttcggggataatgcgctcacattgcttatcgtcgcgcgttagcgcaaagcgcatttgtgcaagatggatggcggcttcctgacttatttatcgtggtattgcattgccgagcgcctgggcgagaagacgcgcaaattgtggtgatgattttctaatcagcacttgcgtcgcgcctgaatttgcgtataatgcgcgggcctgtcaaaattgacggccggttcgatatgagccctggtagcgcagtttgctacctaacaatgttcccaatcggggaactctgtaagaacggttacactctcccatcaatcgtaatgggtatgaggagtaatcatttcgtctataaaataattggagctctggtctcatgcagaaccaaagaatccgtatccgccttaaagcgtttgatcatcgtctgatcgatcaatcaaccgcggaaatcgtcgagactgctaagcgcactggtgcgcaagtccgtggtccgatcccgctgccgacccgcaaagagcgtttcaccgttctgatctctccgcacgtcaacaaagatgcgcgtgatcagtacgagattcgtactcacaagcgtctggttgacatcgttgagccaactgaaaaaaccgttgatgctctgatgcgtctggacctggctgccggtgtagacgtgcagatcagcctgggttaatcaggtcatcgagcgattgagaggttgatacaatgattggtttagtcggtaaaaaagtgggtatgacccgcatcttcactgaagatggcgtctctatcccagtaaccgttatcgaagttgaagcaaaccgcgttactcaggtcaaagatctggctaacgatggctatcgcgctattcaggttaccactggtgctaaaaaagctaaccgtgtaactaagccggaagctggtcactttgctaaagctggcgtagaagctggccgcggcctgtgggagttccgtctggcagatggtgaagaatacaccgttggtcagaacattagcgttgaactgtttgctgacgttaaaaaagttgacgtaaccggtacctctaaaggtaaaggtttcgctggtaccgttaagcgctggaacttccgtacccaggacgctacccacggtaactccttgtctcaccgcgttccgggttctatcggtcagaaccagactccgggcaaagtgttcaaaggcaagaaaatggcaggtcagctgggcaacgaacgcgttactgttcagagcctggacgtagtacgtgttgacgctgagcgcaacctgctgctggttaaaggtggtgttccgggtgcaaccggctgcgacctgatcgttaaaccagctgtgaaggcgtaaggggatagcaatggaattagtattgaaagacgcgcagagcgcgctgactgtttccgaaactaccttcggtcgtgatttcaacgaagcgctggttcaccaggttgttgttgcttatgcagctggtgcgcgtcagggtactcgtgctcagaagactcgttctgaagtaactggttcaggcaaaaagccatggcgccagaaaggtaccggccgtgcgcgttcaggttctatcaagagcccgatctggcgttccggtggcgtaaccttcgctgctcgtccgcaggaccacagtcaaaaagttaacaagaagatgtaccgcggcgcgctgaaaagcattctgtccgaactggtacgtcaggatcgtctgatcgttgtcgagaagttctctgtagaagcgcctaaaactaagctgctggctcagaaactgaaagacatggctctggaagatgtgctgatcatcaccggtgagctggacgagaacctgttcctggccgcacgtaacctgcacaaggttgacgtacgcgatgcgactggtatcgacccggttagcctgatcgccttcgacaaagtcgtaatgactgctgatgctgttaagcaagttgaggagatgctggcatgattcgtgaagaacgtctgctgaaggtgctgcgcgcaccgcacgtttctgaaaaagcgtctactgcgatggaaaaaaccaacaccatcgttctcaaagttgctaaagacgcgaccaaagcagaaatcaaagctgctgtgcagaaactgtttgaagtcgaagtcgaagtcgttaacaccctggtagttaaagggaaagttaaacgtcacggacagcgtatcggtcgtcgtagcgactggaaaaaagcttacgtcaccctgaaggaaggccagaatctggacttcgtcggcggcgctgagtaagtcggaggagtaatacaatggcagttgttaaatgtaaaccgacatctccgggtcgtcgccacgttgttaaagtggtcaacccagagctgcacaagggcaaaccttttgctccgctggttgaaaaaaacagcaaatccggcggtcgtaacaacaatggccgtatcaccactcgtcatatcggtggtggtcacaagcaggcttaccgtattgttgacttcaaacgcaacaaagatggtatcccggcagttgttgaacgtcttgagtacgatccgaaccgttccgcgaacatcgcgctggttctgtacaaagacggtgagcgccgttacattctggcccgaaaggcctgaaagctggcgaccagattcagtctggcgttgatgctgcaatcaaagcaggcaacaccctgccgatgcgcaatatcccggttggttctaccgttcataacgtagaaatgaaaccaggtaaaggcggtcagctggctcgttccgctggtacttacgttcagatcgttgctcgtgacggtgcttatgtcaccctgcgtctgcgttctggtgaaatgcgtaaagtcgaagcagactgccgcgctactctgggcgaagttggcaatgctgagcatatgctgcgcgttctgggtaaagcaggtgctgcacgctggcgtggtgttcgtcctaccgttcgcggtactgcgatgaacccagtcgatcacccacatggtggtggtgaaggtcgtaactttggtaagcacccggtatccccgtgggcctgcagaccaaaggtaagaagacccgcagcaacaagcgtactgataaattcatcgtacgtcgccgtagcaaataattttagaggataagccatgccacgttctctcaagaaaggtccttttattgacctgcacttgctgaagaaggtagagaaagcggtggaaagcggagacaagaagcccctgcgcacttggtcccgtcgttcaacgatctttcctaacatgatcggtttgaccatcgctgtccataatggtcgtcagcacgttccagtctttgtttccgacgaaatggttggtcacaaactgggtgaattcgcaccgactcgtacttatcgcggccacgctgctgataaaaaagcgaagaagaaataaggtaggaggaagagatggaaactttagctcaacatcgccatgctcgttcttctgctcagaaggttcgccttgtagctgacctgattcgcggtaagaaagtgtcgcaggccctggatattctgacctacaccaacaaaaaagctgctgtactggtcaagaaggtactggaatctgccattgctaacgctgaacacaacgatggcgctgacattgatgatctgaaagttgcgaaaattttcgtagacgaaggcccgagcatgaagcgcattatgccgcgtgctaaaggtcgtgcagatcgcatcctgaagcgcaccagccacatcactgtggttgtgtccgatcgctgagactctggagactagcaatgggtcagaaagtacatcctaatggtattcgcctgggtattgtcaaaccatggaactctacctggttcgcgaacaccaaagaattcgctgacaacctggacagcgattttaaagtacgtcagttcttaactaaagagctggctaaagcgtctgtatctcgcatcgttatcgagcgtccggctaagagcatccgtgtgaccattcacactgctcgcccgggtatcgttatcggtaagaaaggcgaagacgtagaaaaactgcgcaaggtcgtagcggatatcgctggcgttcctgcacagatcaatattgccgaagttcgtaagcctgaactggacgctaaattggttgctgacagcatcacttctcagctggaacgtcgcgttatgttccgtcgtgctatgaagcgtgctgtacagaacgcaatgcgtctgggcgctaaaggtatcaaagttgaagttagcggccgtctgggcggcgcggaaatcgcacgtaccgaatggtaccgtgaaggtcgcgtaccgctgcacactctgcgtgctgacatcgactacaacacctctgaagcgcacaccacttacggtgtaatcggcgttaaggtatggatcttcaaaggtgagatcctgggtggtatggctgctgttgaacaaccggaaccggctgctcaacctaaaaagcagcagcgtaaaggccgtaaataaggagcgtcgctgatgttacaaccaaagcgtacaaaattccgtaaagtgcacaaaggccgcaaccgtggtctggcgcagggtacggatgttagcttcggcactttcggtctgaaagctgttggccgtggtcgtctgactgcacgtcagatcgaagcagcacgtcgtgctatgacccgtgcagttaagcgtcaaggtaagatctggatccgtgtattcccggacaaaccgatcaccgagaagccgctggaagttcgtatgggtaaaggtaaaggtaacgtggagtactgggttgccttgattcagccgggtaaagtcctttatgaaatggacggcgtaccggaagagctggcccgtgaagcattcggcctggcagcagcgaaactgccgatcaaaaccacctttgtaactaagacggtgatgtaatgaaagcaaaagagctgcgtgaaaaaagcgttgaagagctgaacgctgagctgctgaacctgctgcgtgagcagttcaacctgcgtatgcaggctgcaagtggccagctgcaacagactcatctgctgaagcaagtgcgtcgtgatgttgcacgcgttaagactttactgactcagaaggcgggtgcgtaatgaccgataaaatccgtactctgcaaggtcgcgtagttagcgacaaaatggagaaatccattgttgttgctatcgaacgttttgtgaaacacccgatctacggtaaattcatcaaacgtacgaccaaactgcacgtacatgacgagaacaacgaatgtggtatcggcgacaaggttgaaatccgtgaatgccgtccactgtccaagactaagtcctggacgctggttcgcgttgtagagaaagcggttctgtaatagagtacgcattctcaatacgaataaacggctcagcgatgggccgtttattttttctacccatattgcagaagcggtgttataatgccgcgccctcgatatggggctttttaacgacccagcttttgggtcccagtagtagttgacattagcggagcactaaaatgatccaagaacagactatgctgaacgtcgccgacaactccggtgcacgtcgcgtaatgtgtatcaaggttctgggtggctcgcaccgtcgctacgcaggcgtaggcgacatcatcaagatcaccatcaaagaagcaattccgcgtggtaaggtcaagaaaggtgatgtgctgaaggcggtagtggtgcgcaccaagaagggtgttcgtcgcccggacggttctgtcattcgcttcgatggtaatgcatgcgttattttaaacaataacagcgagcaacctatcggtacgcgtatttttgggccggtaactcgtgaacttcgtaacgagaagttcatgaaaattatctctctggcaccagaagtactctaaggagcgaatcatggcagcgaaaatccgtcgtgatgacgaagttatcgtgttaaccggtaaagataaaggtaaacgcggtaaagttaaaaatgtcctgtcttccggcaaggtcattgttgaaggtatcaacctggttaagaaacatcagaagccggttccggccctgaaccaaccaggcggcatcgtagagaaagaagcagctattcaagtctctaaccttgctatcttcaacgcggcaaccggcaaggctgaccgtgtaggctttagattcgaagacggcaaaaaagtccgtttcttcaaatctaatagcgaaactatcaagtaatttggagtagtacgatggcgaaactgcatgattactacaaagacgaagtagtcgctaaactcatgactgagtttaactacaattctgtcatgcaagtccctcgggtcgagaagatcaccctgaacatgggtgttggtgaagcgatcgctgacaagaaactgctggataacgcagcagctgacctgacagcaatctccggtcaaaaaccgctgatcaccaaagcacgcaaatcagttgcaggcttcaaaatccgtcagggctatccgatcggctgtaaagtaactctgcgcggcgagcgcatgtgggagttctttgagcgcctgatcactattgctgtaccgcgtatccgtgacttccgtggcttgtccgctaagtctttcgacggtcgtggtaactacagcatgggtgtccgtgagcagatcatcttcccagaaatcgactacgataaagtcgaccgcgttcgtggtttggatattaccattaccactactgcgaaatctgatgaagaaggccgcgctctgctggctgcctttgacttcccgttccgcaagtaaggtagggttacttaatggctaagcaatcaatgaaagcacgcgaagtaaagcgcgtggctttagctgataaattcttcgctaaacgcgctgaactgaaagctatcatctctgatgtgaacgcaaccgacgaagatcgttggaacgctgttctcaagctgcagactctgccgcgtgattccagcccgtctcgtcagcgtaatcgctgccgtcaaacaggtcgtccgcatggtttcctgcggaagttcgggttgagccgtattaaggtccgtgaagccgctatgcgcggtgaaatcccgggtctgaaaaaggctagctggtaattgtcaccaattgaatcacgggagtaaagacagatgagcatgcaagatccgatcgcggatatgctgacccgtatccgtaacggtcaggccgcgaataaagctgcggtcaccatgccttcctccaagctgaaagtggcaattgccaacgtgctgaaggaagaaggctttattgaagattttaaagttgaaggcgacatcaagccggaactggaactgactcttaagtatttccagggtaaagctgttgtagaaagcattcagcgtgtcagccgcccaggtctgcgcatctacaaacgtaaagatgagctgccgaaagttatggcgggtctgggtatcgcagttgtttctacctctaaaggtgttatgactgatcgtgcagcgcgccaagctggtcttggtggcgaaattatctgctacgtagcctaatcggaggaaaaaatgtctcgtgttgctaaagcaccggtcgttgttcctgccggcgttgacgttaaagtcaacggtcaggttattacgatcaaaggtaaaaatggcgagctgactcgtactctcaacgatgctgttgaagttaaacatgcagataatgcactgaccttcggtccgcgtgatggttacgtagacggatgggctcaggctggtaccgcgcgtgccctgctgaactcaatggttatcggtgttaccgaaggcttcactaaaaagcttcagctggttggtgtaggctatcgtgcagcggtcaaaggggatgtagtaaacctggctttaggtttctctcatcctgttgagcataaactgccggccggtatcactgcagaatgtccgactcaaactgaaatcgtgctgaaaggcgctgataagcaggtgatcggccaggttgcagcagatctgcgcgcctaccgtcgtcctgagccttacaaaggcaagggtgttcgttacgccgacgaagtcgtgcgtaccaaagaggctaagaagaagtaaggtaacactatggataagaaatctgctcgtatccgtcgtgcgacccgcgcacgccgcaagctccaggagctgggtgcaactcgcctggtggtacatcgtaccccgcgtcatatttacgcacaggtaattgctccgaatggttctgaagttctggtagctgcttctactgtagaaaaagctatctctgaacaactgaagtacaccggtaacaaagacgcggccgcagctgtgggtaaagctgttgctgaacgcgctctggaaaaaggcatcaaagatgtttcctttgaccgttccgggttccaatatcatggtcgtgtccaggcactggcagatgctgcccgtgaagctggccttcagttctaaggtagaggtgtaagatggctcacatcgaaaaacaagctggcgaactgcaggaaaagctgatcgcggtaaaccgcgtatctaaaaccgttaaaggtggtcgtattttctccttcacagctttgactgtagttggtgacggtaacggtcgcgtaggttttggttacggtaaagcgcgtgaagttccagcagcgatccagaaagcgatggaaaaagcccgtcgcaatatgattaacgtcgcgctgaatactggcaccctgcagcacccggttaagggtactcacacgggttctcgtgtattcatgcagccggcttccgaaggtaccggtatcatcgccggtggtgcaatgcgcgccgttctggaagtcgctggggttcgtaacgttctggctaaagcatatggttccaccaacccgatcaacgtggttcgtgcaactattgatggcctggaaaatatgaagtctccagatatggtcgctgccaagcgtggtaaatccgttgaagaaattctggggaaataaaccatggcaaagactattaaaattactcaaacccgcagtgcaatcggtcgtttgccgaaacacaaggcaacgctgcttggcctgggtctgcgtcgtattggtcacaccgtagagcgcgaggatactcctgctgttcgtggtatggtcaacgcggtttccttcatggttaaagttgaggagtaagagatgcgtttaaatactctgtctccggccgaaggctccaaaaaggcgggtaaacgcctgggtcgtggtatcggttctggcctcggtaaaaccggtggtcgtggtcacaaaggtcagaactctcgttctggcggtggcgtacgtcgcggtttcgagggtggtcagatgccactgtaccgtcgtctgccgaaattcggcttcacttctcgtaaagcaatgatcaccgcagaagttcgtctgtctgatctggctcacgtagaaggcgatgtggtagacctgaacacgctgaaagcggctaacattatcggtatccagatcgagttcgcgaaagtgatcctgtctggtgaggtaactcgtccggtaactgttcgtggcctgcgcgtgactaaaggcgctcgtgctgctatcgaagctgctggcggtaaaattgaggaataagtagcagatggctaaacaaccgggattagattttcaaagtgccaaaggtggaattggcgaactgaaacgcagacttttgtttgttatcggtgcgctgattgtgttccgtattggctcttttattccgatccctggtattgatgccactgtacttgccaaactgcttgagcaacagcgaggcaccatcattgaaatgtttaacatgttctctggtggtgctctcagccgtgcttctatctttgctctggggatcatgccgtatatttcggcgtcgatcattgtccagctgctgaccgttgtttatcaaccgctggcagaactgaagaaagaaggggagtctggtcgtcgtaagatcagccagtacacccgctacggtactctggtgctggctatattccagtcgatcggtattgctaccggtctgccgaatatgcctggtatgcagggcctggtgattaatccgggctttgcattctatttcaccgctgttgttagtctggtcacagggactatgttcctgatgtggctcggcgaacagatcaccgaacgcggtatcggaaacggtatctcgatcctgatcttcgccgggatcgttgcgggactcccgccggccatcgcccatactatcgagcaagcgcgtcaaggcgacctgcacttcctcctgttgctgttggttgcagtattagtatttgcagtgaccttcttcgttgtattcgttgaacgtggtcaacgccgcattgtggtaaactacgctaagcgtcaacagggtcgtcgtgtctatgctgcacagagcacacatttaccgctgaaagtgaatatggcgggggtaatcccggcaatcttcgcttccagtattattctgttcccggcaaccatcacgtcatggttcgggggcggtactggttggaactggctgacaacaatttcgctgtatttgcagcctgggcaaccgctttatgtgttactctatgcgtctgcaatcatcttcttctgtttcttctacacggcgttggttttcaacccgcgtgaaacagcagataacctgaagaagtccggtgcatttgtaccaggaattcgtccgggagaacaaacggcgaagtatatcgataaagtaatgacccgcctgactctggtcggtgcgttgtatatcacttttatctgcctgatcccggagttcatgcgtgatgcaatgaaagtgccgttctacttcggtggaacctcgctgcttattgttgtcgtcgtgattatggactttatggctcaagtgcaaactctgatgatgtctagtcagtatgagtctgcattgaagaaggcgaacctgaaaggctacggccgctaactggtcgcccgagaagttacggagagtaaaaatgaaagttcgtgcttccgtcaagaaattatgccgtaactgcaaaatcgttaagcgtgatggtgtcatccgtgtgatttgcagtgccgagccaaagcataaacagcgccaaggctgatttattcgcatatttttcttgcaaagttgggttgagctggctagattagccagccaatcttttgtatgtctgtacgtttccatttgagtatcctgaaaacgggcttttcagcatggtacgtacatattaaatagtaggagtgcatagtggcccgtatagcaggcattaacattcctgatcagaaacataccgtaattgctttaactgcaatttttggtatcggcaagacccgctctaaagccatctgcgctgaaacgggtatcgctgaaaatgttaagatcagtgagctgtctgaagaacagattgattctctgcgtgaagcagtaggtaaatttgtcgttgaaggtgatctgcgccgtgaaatcaccctgagcatcaagcgtctgatggaccttggttgctaccgtggtttacgccatcgtcgtggtcttccggttcgcggtcagcgtactaagaccaacgcacgtacccgtaagggtccgcgtaaaccgatcaagaaataatcggggtgattgaataatggcaaaggcaccagttcgtgcacgtaagcgtgtaagaaaacaagtctctgatggcgtggctcatatccatgcttcttttaacaacaccatcgttaccattactgatcgtcagggtaacgcgctgggttgggcaacagccggtggttccggtttccgtggttctcgcaaatccactccgtttgcagctcaggttgcagcagagcgttgcgcagaagccgtaaaagaatacggcatcaagaatctggaagttatggttaaaggtccgggtccaggtcgcgaatctactattcgtgcactgaacgccgctggtttccgcatcactaatattactgatgtgactccgatccctcataacggttgtcgtccgccgaaaaaacgtcgcgtataacgcctcgtttctaggattgttggagaaagaaaatggcaagatatttgggtcctaagctcaagctgagccgtcgtgagggcactgacttattccttaagtctggcgttcgcgcgatcgataccaagtgtaaaattgaacaagctcctggccagcacggtgcgcgtaagccgcgtctgtctgactatggtgtgcagttgcgtgaaaagcaaaaagttcgccgtatgtacggtgtgctggagcgtcagttccgtaactactataaagaagcagcacgtctgaaaggcaacaccggtgaaaacctgttggctctgctggaaggtcgtctggacaacgttgtataccgtatgggcttcggcgccactcgtgctgaagcacgccagctggttagccacaaggctatcatggtaaacggtcgtgttgttaacatcgcttcttatcaggtaaaagcgaatgacgttgttagcatccgtgagaaagcgaaaaagcaatctcgcgtgaaagccgctctggagctggctgagcagcgtgaaaagccaacctggctggaagttgatgctggcaagatggaaggtacgttcaagcgtcagccggagcgttctgatctgtctgcggacattaacgaacacctgatcgtcgagctttactccaagtaaagcttagtaccaaagagaggacacaatgcagggttctgtgacagagtttctaaaaccgcgcctggtcgatatcgagcaagtgagttcgacgcacgccaaggtgacccttgagcctttagagcgtggcttcggccatactctgggtaacgcactgcgccgtattctgctctcatcgatgccgggttgcgcggtgaccgaggttgagattgatggtgtactgcacgagtacagcaccaaagaaggcgttcaggaagacatccttgaaatcctgctcaacctgaaagggctggcggtgagagttcagggtaaagatgaagtcatccttactttgaataaatctggcattggccctgtgactgcagccgacattacccacgacggtgatgtcgaaatcgtcaagccgcagcacgtgatctgccacctgaccgatgagaacgcatctattagcatgcgcatcaaagttcagcgcggtcgcggttatgtgccggcttctgcccgaattcattcggaagaagatgagcgcccaatcggccgtctgctggtcgacgcctgctacagccctgtagagcgtattgcctacaatgttgaagccgcgcgtgttgagcagcgtaccgacctggacaagctggtcatcgagatggaaaccaacggcacaatcgatcctgaagaggcgattcgtcgtgcggcaaccattctggctgaacaactggaagctttcgttgacttacgtgacgtacgtcagccggaagtgaaagaagagaaaccagagttcgatccgatcctgctgcgccctgttgacgatctggaattgactgtccgctctgctaactgcctcaaggcagaagctatccactatatcggtgatctggtacagcgtaccgaggttgagttgctgaaaacgccgaacctgggtaaaaaatctcttactgagattaaagacgtgctggcttcacgtggtctgtctctgggcatgcgcctggaaaactggccgccggcaagcattgctgacgagtaaccggatcacaggttaaggttttactgagaaggataaggtcatgcgccatcgtaagagtggtcgtcaactgaaccgcaacagcagccatcgccaggctatgttccgtaacatggcaggttcgctggttcgtcatgagatcatcaagacgaccctgccgaaagcgaaagaactgcgtcgcgtagttgagccgctgattactcttgccaagactgatagcgttgctaatcgtcgtctggcattcgcccgcactcgtgataacgagatcgtggcaaaactgtttaacgagctgggcccgcgtttcgcgagccgcgccggtggttacactcgcattctgaagtgtggcttccgtgcaggcgacaacgcgccgatggcatacatcgagctggttgatcgtgctgagctgaaagcagaagctgctgcagagtaatctgtagtaacgtaaaaaaacccgccccggcgggtttttttatatctaccgcagtcccacttcactacactatctgtactctttttgttcatccctgggagccgtataatgtggttactggaccaatgggcggaacgccacatcctcgacgcacagtctaaaggcgagtttgataatctgaacggcagcggcgaaccgctggcgctggatgatgattcacacgtgcccctgaactgcgcgccggttatcgattattaaaaaatgccggctgtttgccaccggagcttgagttacgtagagatgccatggcgttgagcgacttactcaagaccgtagagcatgatgacccgcggtataccgaattaaagcgtcgcttgactctgtttgaactgaaattacgtcaggcaggtatgaataccgattttctacgcggtgattatgccgacaggctatggcacaaaattaacgaggagtagctatgtatcggattggcgaactggccaaactggctgatgtcaccccggataccatccgctattatgaaaagcagcaaatgatggatcacgatattcgcactgaaggcggttttcgcctctattcggataacgatctgcagcggctgcgctttatccgttatgcccggcaattgggcttcactctggagtcgatccgcgaattattatcgatccgtatcgatcccgaacatcatacttgccaggagtctaaagggatcgtccaggcccggctaagtgaagtcgaagcgcgtatcaaagaacttgaaacgatgcggcgttctctgcagcgtctgaatgatgcctgttgcggcacggcgcacagtagcgtttactgctcgattctcgaagccttagagcaaggcgccagcggtagccacgccgggcgttgattttttccgcgcgcggatctacactcgcgccgaattcatacatgaactggagttactatgagtcgctatcagcataccaaagggcaaattaaagataatgcgattgaggcattactgcatgacccattattcagacagcggattgagaaaaataagaaagggaaaggaagctatcaacgtaaagacaaacatgcagggcggaatgaccgggaggccagtggcaagcaagcgaatcgcttttttaccactggccttctgctttctgtgtgctgattaagaacggttgttttgttcttttaacagatcgcggatttcactcagaagtacttcttctttgctcggtgccggagcggctggcgcttcttctttcttacggttcagtttattcatcagtttgatcgccatgaaaatcgcgaaggcgacgataatgaaatcgaagacgttctgaataaacacaccataatgcatgacaacggccgggacatcccctgcgcatcgcgtagcgtaacggcgaattgtttaaagtcgatcccgccaatgagcaaacccagcggaggcataataatatcggccactaaagacgatacaattttaccgaatgctgcaccaatgatgacacccactgccaaatcgacaacattcccgcgcattgcgaattcgcggaattcttttaacatacccattttactctccttgagccagctgacattgataagtttatcaaatgtatttccattttccattgctgttgaataattgccggaaaatattatccattgataaataagggataataaaaaggcgtctgcgcgacgcccattgtaattacaggaagaacgggctcggttggaatagtctctcaacgtcggagataaatttcttgtcggtcaggaacataattacgtggtcgccttgctcaatacgtaaattattattggcgatcattacgtcattcccacgcaccaccgcgccaataatcgtgcccggcggtagcttaatttcatcaattgaacggccaactacccgcgaggtgctttcatcgccatgcgcgacggcctcaatcgcttcggcaacgccacggcgtagtgacgaaacaccgacaatatcagctttacgtacatggctcagcaaggcagaaatagtggcttgttgcggtgatatcgcaatatcgatcacgcttccctgaaccagatcgacataagcgcgacgctggatcagcaccatgaccttcttcgcgcccatccgcttggccagcattgccgacatgatattggcttcgtcatcgttggtgacggcaataaagagatcgacttgatcgatatgctcttccgccagtaactcttgatccgatgcatcgccataaaagacgatcgtattctgcagcttttcggcaagctcagcggcacgctgttgatcgcgctcgatcaacttcacgctgtagtctttctccaggcggtgcgcgagacccgcgccgatgttgccgccgccgaccagcataattcgtttgtagggtttctccagacgttggagttcactcattaccgcgcgaatatgttgcgacgcggcgataaagaagacttcgtcgccagcttctacgatggttgatccctgcgggcgaatcggtcgatcgtggcggaagatagccgcaacgcgtgtgtcgatgtgcggcatatgttcgcgcatcgtggaaagcgcattaccgaccagcgggccgccataataagccttcacaacggcgaggcttacttttccttcggcgaagttcactacctgcagcgcgcccggatattcgatcaggcggtagatattatcgatgactaactgctccggggcgatcagatggtcaattggcaccgcttctgaatggaaaagcttatcagcatcacgaacgtaatcgggcgaacgaatacgggcgatacgattcggtgtattaaacagcgaataggcgacctggcaggccaccatgttggtctcatccgaactagttacggcgaccagcatatcggcatcatcggcgccagcttcgcgcagcacgcgcggatgcgaaccgtggccctgaacgacgcggagatcgaacttatcctgcaggccgcgcagacggtcgccgttggtatcgaccagggtaatatcgttgttttcgccaacgagattttccgccagcgtgccgcctacctgtccggcgccaagaataataatcttcatcagcagtgacccattaattgcgctttttgattagcttagcgtaaaagaagccatcgccttcttccgccctggcagattttgctgacccggggtttccggcgttcccgtctcatggagttcggcatctctggtacgggtcaggaaagcggcgatttgttggctgttctcttccggcaaaatagagcatgtcgcatagaccagcgtaccgccaggcttaagatgagcccaggtggcatcgagaatgtctgcctgtaattgcgccagctcggcgatatcgcgatcccggcgcagccatttaatatccggatggcgacggataacgccggtagctgaacatggtgcatccagcaagatgcgatcgaactgctcatcgccgcaccactgttcaggatagcgaccatcgccctgtttcacttctgctttcatgcccagacgtttcaggttgtcatagacacgggacaggcgctgctggtcgatatcgaccgccatcagattcgcctgaggcgcgacttccagaatatgcgtcgtcttgccgcccggcgccgcgcagagatcgagaatgcgctcgccgttttccggttgtaagtagcgcatgcagccctgggctgaggcgtcctgaacggttacccagccttcatcaaatcccggtaacgcatggaccggggctggggacgcaagacggacggcatccggatagtccgggtgagcgaaaccctgtaaaccagcctcttccagcagagagagccattcatctcgcgaatgatgattgcgattcacacgcagccacattggcggacgtagattattggctgacacaatatcctgccattgttgcggccaggcctgctgcagacgtttaagcagccatttaggatggagataacggttctcgtgctgggcaaattcggccagcagctcttcctgctggcgctgaaactggcgtaatacgccattgataagccctttaagctgcggacgcttaattgccaccgcgccttccaccgtttccgctagcgcggcgtgcgggggaattcgcgtataaagtagctgatacaggccgaccatgatcaggaaatgtacggtacgctgtttgccggtcattgggcgggccatcagcttaccgattagccactcgagttggctgagggtgcgcaaaacgccgaagcacagctcctgcagcagcgctttgtctttttcgctcactttttgctgaagcggcggcagaacattgcttaaagactggcctttctctacgacctgttcaatagcctgggctgccaggctgcgtaaattactattctttttcataagcgcaaaaataaaaatgcccggcgaacccgggctttagaagagaagtgcgtcaggcaagacggtttccggggataaaccattcccggcgagagttcagtaaatcctgggcactcatcgcttttttccctgccggctgcagtgattccagattcagaataccgttgccggtggcaacctggatcccctgcttggttgctgcaacgatcgtgcctggctctgcgttggcggattctgtaataacggatgcacgccacaccttcaccggttgctcatcgatttccagccagctcatcggccagggattaaatgcgcggatgcagcgttcgagctgttctgcggaaagcgaccaatcaatgcgggcctcttccttacttagcttctcggcgtagctgacaagcgattcgtcctgaacttcaggctctgcgctaccatcggccagctgcgctaaggttgccagtagaccctctggtccaaggtcggccagtttatcgtacaggctgccgctggtatcttccgcggtaatcgggcaggagagcttatacagcatgtcaccggtatcaagaccgacgtccatctgcatgatggttacgccggtttcggcatcgccagcccatagcgaacgctgaatcggcgctgcgccacgccagcgtggaagcagggagccgtgaacgttaatgcagcccaaacgcggcatttcaagaaccgctttgggcaggatcagtccgtaagccacgacgaccataacatcggcgttaaggtcggcaaccagttgctgattttcctgcggacgtagggaggatggctggaagaccggtagattattggcttcagccagcacttttaccgggctcggcatcaattttttgccgcgaccagcagggcggtcgggctgagtaaatacgccgacaacctgatgttcagacgacaacagcgcgtcaagatgacgcgctgcaaagtcgggggttccggcgaaaatgatacgtagtgtttgtgacacgttaatccttgttatcaggcacgggcgcgtaaacgatccagtttttcaactttctggcgaatgcgctgctgtttgagcggcgacagatagtcaatgaacagcttaccgaccaggtgatccatttcatgctggatacagatagccaacaagccatcagcttccagttcgaaagttttaccttcacggtccagcgcgcggatttttacggtttcggctcgtggaaccagcgcacgttgttccggaattgacaaacaaccttcttcaatgccggtttcgccgtctttttcgagtagctctgggttgatgagcaccaggcgctcttcacggttttccgagacatcaataacgataatgcgctgatggatatccacctgcgtggcggccagaccaataccttcttcagcgtacatcgtgtcgaacatatcatcgacgatacgctgaatttctgcattcacttctttgaccggctcggcgactttgcgaaggcgctcgtccggaatatgtaacacttgcaaaactgccataaagatccagagtcgtattcagtagttgataagattattacctctattctagacaaaaccccctctaattgacagtctcgctaaccaatcacaaggattggctgagccgctaatggcaggggggaacggatgaagcccacggagatttggctgcgcctgatgcgggtgaataatctgtacggcgatgaaatggtattgattgcgcgacggctgggatgtgcaggccagttggatactgaaacgttgtgggctgcgggtttaactaaagcgcaggcaacacagttttttgccctcaaccaacagcaaattgatgtttcactgcaatggttagagcaaccagaacatcatctgatcccggccgatcacgcgctctacccgccgcagctacgcgctatcgatgattatcccggcgcgctgctggtctgcggtaacgtcgatctcttgtgtagccgacagttggctatcatcgggagccgcgcgcactcgtggtacggcgcgcggtggggaagagcattcagtgaagcgctggctcagtatggcttgagcattaccagtggtctggcgttggggattgatggcatcgcccatcgcggcgcgttggcggcaaaagggaaaaccatcgctgtattaggcaatggtctctctgatatttacccgcaccggcatcgggctttagcaaagcagatcgtggaaagcggtggcgcgctactttccgaatttcctctctctgcattacccttaccggggaatttcccgcgccgcaaccggattatcagcggtttaagcgcaggtgtactggtaattgaggctgccttgaaaagcgggtccctggtaactgtccgctgtgcgctggagcaggggagagatgtttttgctctgcctgggccaattggcaatcctggctctgaagggccgcactggctgataaagcagggagcagttcccgttaccgtgccggaagagatccttgagtattggcaatatgagctttcagcacgggaagagaccgctgatttgctaaataattacgcagatcagcctcctgtagcattgccatttccagagctcctggctaacgtaggagatgaggtaacacctgttgacgttgtcgctgaacgtgccggccaatctgtgccagtaaccgtagcccagctacttgaactggagttagcaggctggatcgcagctgtacccggcggctatgtccgattaaggagggcaagccatgttcgacgtactcatgtatttgtttgagacttatatccataacgaagcagaaatgcgcgtggatcaggacaaactgacgcgggatctgaccgatgcaggttttgaacgggaagatatctataacgcgttaatgtggctcgagaaactggctgattatcaggaaggtctcgttgaacccatgcagctcgcctccgacccgctctctcttcgggtatacaccgatgaagagtgccagcgtctggatgccagctgtcgaggatttttactcttcctcgagcagatccaggtgttgaacctcgaaacgcgagaaatggtgatagagcgcgtactggcgctggatacggcagagtttgaactggaagacctgaaatgggtgatcctgatggttctgttcaatattccaggctgtgaaaacgcctatcagcaaatggaagaattactcttcgaagtaaatgaaggtatgctgcattaatcttattgcagcaacatcgagttgttatgaccaaatcagcactgttttcggtgcgtaaaaacgagccctgcccgcagtgcggggccgaactggtgattcgttccgggaaacatggcccgtttcttggctgttctcactatccggactgtgactatgtccgtcccctgaaaagtcaggcggatggacatatcgtcaaggtgctggaggggcaagagtgcccatcttgcggcgctgtcatggtgttacgccaggggcgttttggtatgttcatcggctgcagtcgctatcccgaatgcgaacataccgagctgattgataaacctgatgagaccgctatcgcgtgcccgcaatgcggacagggtcatctggtgcagcgtcgctcccgtttcggtaaaacctttcattcctgcgatcgctaccctgattgccagttcgtaattaattttaaaccggtggcgggcgaatgccctgaatgccattacccgctattaatagaaaagaaaacggcgcagggtgttaaacgcttttgcgccagtaaacaatgtggaaagccgatcccggcggaataaataagtgaataaaaacctgccctcagaaaccgtcgtacaggctgtggcggtactgaataatgaacatgtcatcgcctatccaaccgaagcggtatttggcgtcggttgcgatccggatagcgaaacggccgtgatgcgccttctggcgttaaaacagcgtcctgttgaaaagggattaattcttatcgccgccagctttgaacagttgaaaccgtatattgatgattcccggttaagcgacgcgcagcgtgaagttatcttttcctgttggcccggcccggtgacgttcgtgttcccggcacgcccgaataccccacgctggctgacggggcgctttgattcgctggccgtgcgcgttactaatcatccgctggtgattgaattatgcgaagcctacggaaaaccactggtctcgacgagcgccaacttaaccgggcagccgccgtgtcggaccactgctgaagtgcgcgcccagtttggcgatagttttccggtggtggatggggcaacgggcgggcggcaaaacccatctgaaatccgtgatgccctgacgggtgaacagtttcgccaggggtaatttatggaaacttatgccgtttttggtaaccctatagctcatagcaagtcgccttctattcatcagctgtttgccaaacagttagatattgagcacccctatggtcgggtactggcgccattagatgattttgtgaataccctggatgctttcttcaacaccggcggcaagggcgctaatgtgaccgtcccttttaaagaagaagcgtttgcccgcgccgacgaactcactgaacgcgccgcgctggctggcgcggtcaatacgttgaagcgtcttgaggatggtcggctgcttggcgacaatacggatggcattgggctcttaagcgatttagagcgcttgggctttatcaagcctggtatgaggattttattgattggcgccggcggcgcatcacgcggcgtattgttaccgctactttctttagattgcgcggtcactatcgttaaccgtactttttcccgcgctcatgaactggcaacgctattttctcataccggcagcgttagcgcgttatcgctggataaactggaaggccatcagttcgacctcattattaacgcgacgtccagcggtataagcggcgatatccccgcaataccttcttcgttaattcatgccgacgtttactgctatgacatgttttatcagaaaggaaatacgccatttctgcattggtgccagcagtatggtgctaaaaaaatggctgatggattaggaatgctggtggctcaggccgcacatgccgttctgctgtggcacggtagactaccggagattgccccggtgattgccgttttacatcaggaactgaatgcgtgaaccaggcgatccaatttcccgatagagaagaatgggacgctgaacggcaatgcatcgttttccccgcgctggtcaatgggatgcagttaacgtgcgcgattcggggtcagaccatgcagcaaaggttcggtggcgatgagccagcgcagtggctggctctatttagtgaacatcgctgggatctggaagatgaagcggaagcgctgattcgcgatcggcaagaagaccatcagggttggctctggttttcctgagccaggtagtcgtctttccacttcacatagttgttggctgaatacttcagccctgcatattccgcttctgtcaggggcggatttgttttaccggattgccaaagtagagatatccgctttccagacgcttgttttgcggaaccaggctgccggcgccgatcatcacgtcatcctctaccaccacgccatccagcagaattgaccccattccgacaaggatgcgattgccgatagtgcagccgtgcagcatgaccttatgcccgacggtaacatcttctccgatgagtagaggattaccctcaggattataagaagacttgtgggtgacatgcaggacgctaccgtcctgaatattcgaacgtgcgccgatcgatacatagttcacgtcgccgcggatggcgaccagtggccaaatgcttacatcatcagcaattctgacatcgccgatcacaacgctgctgggatccaccatcacccgcagaccgatttggggacataattctttataaggacgtaaataactggacatggctgcctcaacatcagggtagataaccagactttggtagctttcaggcgctcccgcaacccctttttctgataaaaattgagctatttgagcaataacagcgcgaaaagcgcgaaaaaccatcattcagaaaaaaagatcgaaaaaaggcttgtgcaaataaatgggatccctataatgcgcacccactgacacggcagatgtgaatcacttcacacaaacagccggttcggttgaagagaaaaattctgaaattcagggttgactctgaaagaggaaagcgtaatatacgccacctcgcgacagagcgctaaagcgcgtcgcaactgctctttaacaatttatcagacaatctgtgtgggcactcaaagtgacatggattcttaacgtcctcggacgaaaaatgaataccaagtctctgagtgaacatacgtaattcattacgaagtttaattcacgagcatcaaacttaaattgaagagtttgatcatggctcagattgaacgctggcggcaggcctaacacatgcaagtcgagcggtagcacagagagcttgctctcgggtgacgagcggcggacgggtgagtaatgtctgggaaactgcctgatggagggggataactactggaaacggtagctaataccgcataacgtcgcaagaccaaagtgggggaccttcgggcctcatgccatcagatgtgcccagatgggattagctagtaggtggggtaatggctcacctaggcgacgatccctagctggtctgagaggatgaccagccacactggaactgagacacggtccagactcctacgggaggcagcagtggggaatattgcacaatgggcgcaagcctgatgcagccatgccgcgtgtatgaagaaggccttcgggttgtaaagtactttcagcgaggaggaaggcgttaaggttaataaccttggcgattgacgttactcgcagaagaagcaccggctaactccgtgccagcagccgcggtaatacggagggtgcaagcgttaatcggaattactgggcgtaaagcgcacgcaggcggtctgtcaagtcggatgtgaaatccccgggctcaacctgggaactgcattcgaaactggcaggctagagtcttgtagagggggtagaattccaggtgtagcggtgaaatgcgtagagatctggaggaataccggtggcgaaggcggccccctggacaaagactgacgctcaggtgcgaaagcgtggggagcaaacaggattagataccctggtagtccacgccgtaaacgatgtcgacttggaggttgtgcccttgaggcgtggcttccggagctaacgcgttaagtcgaccgcctggggagtacggccgcaaggttaaaactcaaatgaattgacgggggcccgcacaagcggtggagcatgtggtttaattcgatgcaacgcgaagaaccttacctactcttgacatccagagaacttagcagagatgctttggtgccttcgggaactctgagacaggtgctgcatggctgtcgtcagctcgtgttgtgaaatgttgggttaagtcccgcaacgagcgcaacccttatcctttgttgccagcgattcggtcgggaactcaaaggagactgccagtgataaactggaggaaggtggggatgacgtcaagtcatcatggcccttacgagtagggctacacacgtgctacaatggcatatacaaagagaagcgacctcgcgagagcaagcggacctcataaagtatgtcgtagtccggattggagtctgcaactcgactccatgaagtcggaatcgctagtaatcgtagatcagaatgctacggtgaatacgttcccgggccttgtacacaccgcccgtcacaccatgggagtgggttgcaaaagaagtaggtagcttaaccttcgggagggcgcttaccactttgtgattcatgactggggtgaagtcgtaacaaggtaaccgtaggggaacctgcggttggatcacctccttaccttaaagaacctgcctttgtagtgtccacacagattgtttgataaataataaatttcaaaatgtactgttaagtgcattgtgaaattttgctctttaaaaatctggatcaagctgaaaattgaaacgacacacagtcaatgtgtgttcgagtctctcaaattttcgcgacacgaaaatgttttacgaaacatcttcgggttgtgaggttaagcgactaagcgtacacggtggatgccctggcagtcagaggcgatgaaggacgtgctaatctgcgaaaagcgtcggtaaggtgatatgaaccgttataaccggcgatgtccgaatggggaaacccagtgcaattcgttgcactatcgttaactgaatacataggttaacgaggcgaaccgggggaactgaaacatctaagtaccccgaggaaaagaaatcaaccgagattccccagtagcggcgagcgaacggggagcagcccagagtctgaatcagcttgtgtgttagtggaacggtctggaaagtccgacggtacagggtgatagtcccgtacaccaaaatgcacaggttgtgaactcgaagagtagggcgggacacgtgatatcctgtctgaatatgggggaccatcctccaaggctaaatactcctgactgaccgatagtgaaccagtaccgtgagggaaaggcgaaaagaaccccggcgagggagtgaaaaagaacctgaaaccgtgtacgtacaagcagtgggagcaccttcgggtgtgactgcgtaccttttgtataatgggtcagcgacttatattctgtagcaaggttaaccgtataggggagccgcagggaaaccgagtcttaactgggcgttaagttgcagggtatagacccgaaacccggtgatctagccatgggcaggttgaaggttgggtaacactaactggaggaccgaaccgactaatgttgaaaaattagcggatgacttgtggctgggggtgaaaggccaatcaaaccgggagatagctggttctccccgaaagctatttaggtagcgcctcgtgaaytcatcttcggggtnnagcactgtttcggctaggggtcatcccgacttaccaacccgatgcaaactacgaataccgaagaatgttatcacgggagacacacggcgggtgctaacgtccgtcgtgaagagggaaacaacccagaccgccagctaaggtcccaaagtcacagttaagtgggaaacgatgtgggaaggcacagacagccaggatgttggcttagaagcagccatcatttaaagaaagcgtaatagctcactggtcgagtcggcctgcgcggaagatgtaacggggctaaactgtgcaccgaagctgcggcagcgacactatgtgttgttgggtaggggagcgttctgtaagcctgcgaaggtggcctgtgagggttgctggaggtatcagaagtgcgaatgctgacataagtaacgataatgcgggtgaaaagcccgcacgccggaagaccaagggttcctgtccaacgttaatcggnnnnnnnnnnnnnnnnnnnnnnnnnnnnnnnnnnnnnnnnnnnnnnnnnnnnnnnnnnnnnnnnnnnnnnnnnnnnnnnnnnnnnnnnnnnnnnnnagaaggctatgttagccgggcgacggttgtcccggtttaagcatgtaggcggaggttccaggtaaatccggtacctttttaacgctgaggtgtgatgacgaggcactacggtgctgaagtaacaaatgccctgcttccaggaaaagcctctaagcatcaggtaacattgaatcgtaccccaaaccgacacaggtggtcaggtagagaataccaaggcgcttgagagaactcgggtgaaggaactaggcaaaatggtgccgtaacttcgggagaaggcacgcnnnnnnnnnnnnnnnnccctgcgggtggagctgaaatcagtcgaagataccagctggctgcaactgtttattaaaaacacagcactgtgcaaacacgaaagtggacgtatacggtgtgacgcctgcccggtgccggaaggttaattgatggggttatccgtaaggagaagctcttgatcgaagccccggtaaacggcggccgtaactataacggtcctaaggtagcgaaattccttgtcgggtaagttccgacctgcacgaatggcgtaatgatggccaggctgtctccacccgagactcagtgaaattgaactcgctgtgaagatgcagtgtacccgcggcaagacggaaagaccccgtgaacctttactatagcttgacactgaacattgagccttgatgtgtaggataggtgggaggctttgaagcgtggacgccagtctgcgtggagccaaccttgaaataccaccctttaatgtttgatgttctaacgttggcccctgaccggggttgcggacagtgtctggtgggtagtttgactggggcggtctcctcccaaagagtaacggaggagcacgaaggttagctaatcctggtcggacatcaggaggttagtgcaatggcataagctagcttgactgcgagcgtgacggcgcgagcaggtgcgaaagcaggtcatagtgatccggtggttctgaatggaagggccatcgctcaacggataaaaggtactccggggataacaggctgataccgcccaagagttcatatcgacggcggtgtttggcacctcgatgtcggctcatcacatcctggggctgaagtaggtcccaagggtatggctgttcgccatttaaagtggtacgcgagctgggtttagaacgtcgtgagacagttcggtccctatctgccgtgggcgctggagaattgaggggggctgctcctagtacgagaggaccggagtggacgcatcactggtgttcgggttgtcatgccaatggcattgcccggtagctaaatgcggaagagataagtgctgaaagcatctaagcacgaaacttgccccgagatgagttctccctgactccttgagagtcctgaaggaacgttaaagacgatgacgttgataggtcgggtgtgtaagcgtagcgatacgttgagctaaccgatactaatgaaccgtgaggcttaaccttacaacgccgaagctgttttggcggatttgagacgattttcagcctgatacagattaatcgatgcgtcctgaggacgtgttgaaaacagaatttgcctggcggcgatagcgcggtggtcccacctgaccccatgccgaactcagaagtgaaacgccgtagcgccgatggtagtgtggggtctccccatgtgagagtagggaactgccaggcatcaaatttagcgtgctgatatggctcagttggtagagcgcacccttggtaagggtgaggtccccagttcgactctgggtatcagcaccactttttaggttaaagttcggcacttgtaaagaatttgcctggcgacgagagcgcggtggtcccacctgaccccatgccgaactcagaagtgaaacgccgtagcgccgatggtagtgtggggtctccccatgtgagagtagggaattgccaggcatcaaataaaacgaaaggctcagtcgaaagactgggccttttgtttttgtgttttatggccaaacgcgccgccagctctccggtggcgctacgcttacctgggctacagaccccgtagcccgggaaagctgtcatatcaaagtaaatgaaaggcccagtcgtgtgactgggccttttgtctttctgacgactaagccggagggaacgcctccaggctgagcattcatggagaggaattgctaacgagtaagcgccacgatacctaacgtgagaccggcaaccgctgcggccccaccggcgatcgcgccagccgtttcccagttatcctgtgttgtgccttttacacaggtgttggtatgcaccagtcggccctgcgagtcatagaccggtacgcacggggaatcatgggcacagccagcaagcaacgttgctaacaatgtcactaatattaattttttcatggtattacctctaaataaccgtttgctgtcaacgatgtcaacacataacggaatagcttattttaccaccgcaatgacccgggcctggaaggggaaataatctcaaattatgagcagagtaaatatcgtgaagagaaatgagaaataatgaagaaaatatgcagaaagggatatttcaatgcgtcaatcggggatgggaattaatatttctactaacttattgttctgatagatataaaaaaaggcgccgcgtggcgccttgataatcatagtcgattattctgcgtggcgggtaaagcgacgccttacaaccacaaagaacaccggcacgaagaagatggccagcagcgttgcggtaagcataccgcccatcacaccggtaccgacagcgttttgcgcgccgctaccagcaccgtggctaatcactaacggcatgacccgagaataaaggctaatgaagtcattaatatagggcgcagacgcatacgggatgcttccagggtcgcctcaataatacctttgccttctttatccataaggtctttggcgaactcaacaataagaatggcgtttttcgcagataaaccaatagtcgttaacaggccaacctggaaataaacgtcattattcaatcctctaagtgaggctgctaataatgcgccaatcacccctaatggcacaaccagcataactgagaatggaatagaccagctttcatagagtgcagccaggcagaggaagacgactatcagcgaaatagcatatagcgctggcgcctggttgcctgataaacgttcctgatatgacaagcccgtccagtcataaccaatacccgcagggagtttactggccagttgttccatcaaggccatggcttccccggtactcttacccggagccgcttcgccgaggatttccattgaaggcaggccgttgtaacgttcgagacgcggagaaccatatacccaacgtgaagtgacaaatgccgagaacggcaccatttcaccgttagaactgcggacatacatgttattgatatcacccggcagcatacggaaactggcatcggcctgaacgtagactttcttcacgcggccgcggtcaataaagtcattcacataatagccacctagcgctgctgatatcgtttcgtttatgtcggataacgagacgcccagcgcctgcgctttctcttgatcgacgtcgagtttgaactgcggcgtatcctcaagaccattaggacgaacacggactagctgttccggatgctgtttgaccatccccagaagctggtttcgggcctgagttagctgtgtgtgacctaagccgccctggtcaatcagctcgaagtcgaaaccggtcgcggtacctaactcgatgatggccggcatgttgaacggaaagaccatcgcatctttaatctgaccaaatgcagcggtcgcgcgcttgataatggcttcaaccccgttttccgaaccgctgcgttcttcccatggtttcagactgacgaacgccataccggagttttgtccttgtccgctgaagctaaagccgttaacggtgaatacgctttcaacgttagctttctctttctgcagatagtagtcgctgacggagtcgagcaccttttgcgtccgctcttgcgtagcgccagcaggcaactgaaccatggtcaggaatacgccctggtcttcatcaggcaggaaggatgttggcaagcggacaaacagcatcgccatgccgataacgatcagcagatagataaccaggtagcgcccggtgctgcgcaggatcccgctgacgctgttggtgtaatggttaacgctttggtcaaacctggcgttaaaccagccgaagaacccctttttgccatgatggtctgcggatgctggttttaacatggttgcgcacagcgccggggtcagtaccagcgcgaccagtacagacagcgccatcgcggaaacgatagtgatggagaactgacgataaatcgccccggtcgagccgccaaaaaaggccatcgggacgaataccgccgagagcaccatggcgataccaaccagcgccccctggatctgctccattgatttctctgtggcttcaacgggggaaagcttgtcctcgaccatgacgcgctcgacgttctctaccaccacgatggcatcgtcgaccagtagccctatcgccagcaccatgccaaacatggttagcgtgttgatggagtagccgaacatcgccagcaccgcaaaggtacccagcaaaacgaccggcacagcgatcgtcgggataagcgtcgcgcgaatgttctgcaggaacagatacatcacgaggaagacgaggattatggcttcaaacagcgttttgaccacttcgtgtatggagattttaacgaacggcgtggtgtcgtagggataaacaactttcatcccttgcgggaagaagggctgcagctcggcaagtttcgctttaatcgccgtagcggtatctaacgcattagcgccggtcgccagcttgatccccagaccagaggcgggtttgccattaatgcgcgcgacaacgttatagttctcaccgcccagttcaatgcgtgcgacatccttcaggcgaaccacggaaccatcggcgttaacccgcagcgtgactttaccgaattcctcaggatctttcaggcgagtctgagcaatgatcgaggcattaagctgttgacctttaaccgatggtgtaccgccaagctgtccagcggcgatctgatcgttttgcaccttcagttggttgataacatcaaccggtgtgaggttatatttattcagcaggttgccgtcgagccagatacgcatggcatattgcgcgccgaacaattgtacatcgcccacgccgttaaggcggctgatagggtctttgatgttagaggcaacgtagtcggaaatatcatcctgggtagtgcttgggttatcagagataaatccggcaaccagcaggaagctgctactggatttctcaacgctaataccttgctgctgtacttcctgtggcagtaacggcgtcgccagctgcagtttgttctgaacctgcacctgggcgatatccggatcggtgccggattgaaaagtgagcgtgatagtgacgctaccggaagaatcgctggtagaggacatgtacatcagattatcgataccattcatgttctgttcgataacctgggtgacggtgtcctgcacggtttgcgcatctgcaccagggtaggttgccgagatggctactgcgggcggcgcgatcgtgggatattgcgcgataggaagctgcatgatggcgaggccgccggcaatcatcatgatgatcgccagcacccatgcaaacaccggtcgatgaatgaagaacttagacatagcgattcataccttattgtgcggcggggcagcggtatcttccgtcgccttcacggtgacgcctgggcgaaccttctgtaatccactaacgatgactttgtcgccgttttgcaggccgctggtgattaaccatttatcgcctatcgcctgggcagcggtgactttacggttctccacctggttctgcgcattaacgatcaacaccgtggcatcgccgcgcggtgtgcgggtaacccctgctgcggtaccagaatcgcctgcggattgacgccttcatcaatacgagcgcggacaaacatgcccggcagtagagtgtgttgcggattggggaatactgcgcgcagcgtaatggagccggtgctttcatcgacggtcacatcagaaaattgcagcgatcccttcagggaatagggttggccattttccataatcaactgcacgcttttactgtcatcaccgcgctgtaggctttcctgtttcaggcgcataaaatcgttgctggactcggtcacgtcgacatagatcggatcgagttgctgcaccgtcgccatggcgtccgcctggccgttggtcaccagtgcgccttcggtcacgccggatttaccaatccgcccgtcgatgggcgaagtcaccttggtgtaagccagattgatacgggcgttttcgaccgcggctttagccgccacgacatcggcatcggcctgacgcgcggtagcgacggcctgatcgtattcctgctgactgatgtactgagttccaagcagaggaacataacgtttcaccgtcagatgggcgatagccgctgcggcttcggcttttgcctcgtcgcctttggcgctgttccaggccgcctggtaagtagcggggtcgatttgatagagcgattcaccggccttgatatcgctgccctcgacaaagttgcgtttcaggataataccgctgacctgagggcgaacttcagcgacacggaaggccgatgttctccctgggagctcagtggtgacggaaagcggttcactgtgtactacatgtacgctaacctgcggcgcctgaggttgtgcctgctggtcgcctgaattatcgcaaccggtaagcaacaaggcggagataattaggctggataaaagagatactctggcatgactcgtcattgctgttccttatagattacgggccggatagggcggcgaatctgcgaagaaataatgaattttaaagcggttcgttatcctacaaataaacaccgatggatgtaaggaatagttatttttgggcaatgaacaaggcacgcaaaaacaaaaaacaggcgattgatttagctcctcttcctttaatatttcttttgtgaatatgttctttgtttatatttgtctcatgtattaaatatctctgttattaaatgtttgtatctgcatttttgctaaataataatatttaaggaatgttaagttggtaggtatgtcagtaagatttgtattcaccattcggtagctagtggaaaaggtcatggccagaaaaaccaaagaggatgcattaagaacgcgtcaactcctgattgagtccgcgattcagcagtttgcgctacgcggcgtcactaacactacgctcaccgatatcgccgacgccgctggcgtcacgcgaggggcagtgtactggcatttttccagcaaggctgagttgtttaatgagatgtggcagcagcagccgccgctcagagagcttctgccccatcaacagtgggagctggataaccaaaatccgttaacggggttacgtaaaaaatttattaccggattgcaatatatcgccgagaatcctcgacagcaggcactactacaaattctttatcataaatgtgagtttgccagcgatatgctgccggaaaccgaaattcgtaagcgaattggctttaattacgccataatccgtgacgttctgcagcgttgtgtaagaaatagattattaccggctgaaacaaatatcgaaattacgttgataatattacacggcgcttttacaggcattatcaaaaactggttaatggatcctgaacaattcaatctctatcaacaggcgcccgtgctggtagacaatattatgtcggcgttatcactgcaacaacctgaccatagcgggtggccgatggctgccgtggggcagtagttcagtataaaaaatcaggtcataaaaaaggcgcttccccatgccgaagagcgcctttttaattcagcaatttactgattaatatcagttcatgccgtattttttcagtttcttacgcagagtaccgcggttgatacccatcatcagggcagcgcgggtctggttaccacgggtgtattgcatcaccatgtccaacagtggctgttcaacttcagccaataccagctcatacagatcattaacatcctgaccattcagttgagcaaaatagttcttcagtgcctgtttaaccgagtcacgcaggggcttttgagttacctgatcctgagagttaacggtagaaacggtcagtacgtcagaatttacgcgttgttcgaacatagttctgtcagctctttatttctattacgcaaaattttcgaagtatgcctccaacgcctccagctgttcgctggcatcctcaatggcgttgaatgtgcgccgaaactggtcatttggagcatgctcctggagataccaggagacgtgtttacgcgcgattcggtacccttttgcctgaccgtaaaagtcatgcagttcccgaacatgcgcgcaaagcaagcgcttaacctctgccaacggcaggggggcagcaactccccagtgtccagataatgctggatttcccgaaagatccagggtcttccctgagccgcacggcctatcatgagggcgtcagcccccgtgtagtcgagcacggctctggctttaagcgggtcagtaatgtcgccattcgcgataatcggaatggaaactttctgcttaactgcccgaatactgtcgtattcagcttctccgttaaacaagcaggcgcgagtgcgtccgtgaatagtcagagcctgaatgccacattcttcagccagttgggcaatctctacacagttacggtgttccggttcccaaccggtgcgaatcttgagagtcaccggaacgtccactgccttgacgaccgcggtcaggattgacttcacctgatcgggatactgcaagagggctgaaccagcgagcttacgattcacctttttagccgggcaccccatattgatatcaataatctgggcgccgctttccacgttaatacgggcggccgcggccatctcttccggtacgctaccggcgatttgcacggtacgaataccgggctcatcaatgtgcaccatccgtaaccgggacttgtcgctctcccatacctgcgggttggaggacatcatctcggagacggttaaacctgctcccatctcgtaacacagcgtcctgaatggtctgtcagtgatgccagccataggtgctgcgatcaggcgatttctgagctggtggtgtccgatgcgcatgagttaagaaatgaccatactgtgactgcaaggcggcgtatattacgcattttttgcgcgagatgaaaggccaaactttgaccaatcctctgttacagatcaatgaatccaggagtaacgtaatagccatgaataaattatcatattaatcattgcgttattagcaatgggataatttgtgtccaattataaaatcacaaaacttctcgatttttctgagacgaaggcgatacgagacgggataaaacgctgtttttgtagccaaaaaagggcatcgtaatgcgatccggctctcatttcctggcaatattcggcggttactggaaacaaaaatgcggcccgtaggccgcagcttacttagttcttctgtccggtaattcggcaccactcctctttctccaccaccgggtcgagggtgaagagcggggcgtaggcttcgcagacgctttccgcctggcttgccaggattccggaaaggcccagcaggccgcctgtaaccggcaggacgctgattaaaggggccagctcacgcaacgggcctgccaggatgtttgcgaccaccacatcggctttcatggcttctggctgatcctgcggcaaatacagttcaaggcgttcggagacaccgttacgctgggcgttatcacggctggcctgaatggcctgcggatcgatatcaataccgatagctttggcggcgcccagcttcagcgcggcgatcgccaggatgccggaaccgcagccaaaatcgataaccgttttgccctgcaggtcaaggccatctagccactgcagacacatcgcggtcgttgggtgagtgccggtaccaaaggctaatcctggatcaagcatcacattgactgcattctcatcaggaacatcgcgccagcttgggcaaatccacaggcgttcgccgaaacgcatcgggtggaagttatccatccactcgcgttcccagtctttatcttccagttgttcaattttatgcgcgaagccggcgccgagcagcggatgctgctcaaggatggcaactgcttcgttcatgtcgctttctgcgtcgaacaggccaataacgtcggtatcgccccacagacgggtttcacctggcagcggctcgaacaccggcgtgtcgtgggtgtcctggaaggtaatcgagaccgcgccggcctccatcagcgcgtcgctcagttcttccgcgtgtgcgccggtcgtattcagttttagttggatccaaggcatggcaaaactctttatttatcagtagtcataataggggctggcggtacgggctgaccgaaacggttcccgacgacaaaagccaacaaacttagcagcagcgagggcacgatagggtggaagcccaggtactgaatattaaacgtagccagcacggcgtacagaacgccgccgactaacatcgcgctgagcgctccggcagcgtttgcccgctcccagtaaaggcccaataccagcggccataagaacacggcttccaggccgccaaaggctagcagattaagccagataatcatttccggcggccgccaggcggccagcatcataagtatgccgagcactaaggtggcgatcgttgagatccgcttcagcttctgctcattacgctttttcgtcggctgagcgctgagccacagatctttaatgatcgtagccgatgcctgcagtaaatgggcgttaacgttagacataatcgcggccatcggcgccgctaaaaatagccccgcggcccacggcggcagcacctgaaccatcaacgtcgggatcacctgatcggggacagtgaggcccggcaggacagcgcggccaagagcgccggcgagatgcataccgaacatcagaatcgccaccacgatagtgccaataacgatcccgcggtgtacggccttgctgtctttataagagatacagcgtacggcggtatgcggcaagccgatgacgccgaaacagaccagcacccagaacgaggtcatgaaagtaggcgtgaggatatcatcggcgccgtgtggcgataccagctgcggatcgatttgctggagcgtttctaccgcctgatgcaggccaccggcggcatggactacgccaaccagcaggacgatcgttccgatcaacatcaccatcccttgcatggtatcgttgagtacgctggcgcggaagccgccaaaagcggtgtagagcgcaattgtgataccaaatatcagcagcccggtttcgtacttgatcccggcggcggtttccagcaggcgcgcgccgccgataaactgcaccgcgatggccccaacaaaggccaccagcaagctgacgctggcaatccataccaccgcgcggctttggtagcgcgcctgcagcatatcgttaagggtaatggcattgtagcggcgcgccaggatcgcgaacttcttgccgaggatcccgagagagagccagatcgtcggtacctggatcatcgccagcagtacccagcccagcccatatttgtatgcggcgccggggccgccgataaacgagctggcgctaatataggtggcggtgagggtcatagctaatacaaagccgcccatcgatcggctgccgaggaaatactcgctaaggaagttcccggtactgcgtttacgcatcgcgtaaagagacagcccgaagacaacaaacagataagcgatcagcaccacgataatctcaagctgcatcgttatcctccagagagatatcgcggaagataaagcgcaccatcgcccagcacaggaggacgaacagcagcggcaccagcaggcaggccagttcgaaccagtgcggcaggccagtaaagccgataccgacgccaggtagatacgccgcagccagccaggcggcaagatagagaagggtcagccacagcgcccagcgcgcttctttatgggcctgaacaaatcttttgtccattttttgtcccttgaggatgaagaaagcggggattgtaccgcatggaaaagtcgaggggagagaaaaagaaaaaaggccggattatccggccttttgcagcgagtacaggattatttttcctgcagtccgagttttttctccagatagtggatattggtaccaccatgctggaagttctcgtcgctcataatgcgcatctgcagctcaacgttggttttgatgccatcgatgatcaattcctgcagcgcgttcttcatgcgggcaatcgccacatcacggctttcgccgtagcagatcagtttaccgatcattgagtcatagtacggcggtacggtgtaaccggcgtagatatgagactcccagcgcacgccaaaaccgcccggcgcgtggaagcgggtaattttacccgggctcggcaggaaggtattcgggtcttcggcgttgatacggcattccaccgcatgaccgcgaacctgcacttcttcttgcttgatagacagcggctgacccgccgcgatgcgcagctgttctttgatcaggtcaacgccggtgatcatttcggtaaccggatgttctacctgaatacgggtgttcatctcaatgaagtagaactcgccgttttcaaacaggaactcaaaggtacccgctccgcgatagccgatatccacacaggctttagcgcaacgttcgccgatgtagcgacgcagttccggggtaatgcccggcgccggcgcttcttcgacgactttctggtgacgacgctgcatggagcagtcgcgttccgccagatagatagcgttgccctggccatccgccagcacctgaatctcgatgtgacgaggattttccaggtacttctccatatagaccatgtcgttgttgaaagccgctttcgcttccgctttggtcatggagatggattgcgccagttcagcgtcgctgcgcacgacgcgcatgccgcgaccgccgccgccgccggaggctttgatgataaccgggtagccgatgcgtttggcatgcgcgcggttagcgtccatgtcgtcgcccagcgggccatcagaacctggaacggtcggaacgccagctttcttcattgcggtgatggcggacactttgtcgcccatcaggcgtatagtgtcggctttcgggccgatgaagatgaaaccggagcgctcaacctgctcggcaaagttagcgttctcggaaaggaagccgtaacccgggtgaatcgctaccgcgccggtgatttccgccgcgctgatgatagccgggatgttcagatagctttttacggacggagccgggccgatgcagaccgtctcatccgctaataatacgtgttttaaatcgcgatccgcggtggagtgcacagcgacggtcttgatgcccagttctttacaggcacgcaggatgcgcagtgcgatctcgccacggttagcgatgacaattttatccagcatgttcgcctcgttactcgatgacaaccagcggctcgtcgaattctacaggttggccgctttcgatcagaatggctttaaccacgccggctttgtcggcttcgatctggttcatcattttcatcgcttctacgatgcacagggtgtcgcccacgttaactttctgaccgacttccacaaaggctttcgcgtccgggctcggggtgcggtagaaagtaccgaccatcggggaacgtacgatgtgaccactgatttccgctttcgcttcagcggcaggtgctgctgccggcgctgcggcggctggcgcctgaggctgtgcgattggcgcagcataggcttgctgcattaccggatagctggcagccggcgctgcacggctgatgcgtacagactcttcgccttcagaaatttccagttcggagatgcctgattcttcaaccagctcgatcagttttttaatcttacgaatatccatgagtgggttccgtactctttgtttagtgtgtttgtgacaggcgttttaccgccgtctgtaaagcgtatgaatagccgtccgcacctaatccgcagattacacccgaggcgacatcagacagatacgagtggtgacggaacggctcgcgcgcatgcacgttgctcaggtggatctcgataaacgggatactcacggcaagcagcgcgtcgcggatggccacgctggtatgcgtaaacgcggccggattgatcaggatatagtccacagagtctttagcctgatgaattcggtcgatgagcgcgaactccgcattggattgcaggtggtcgagcgtcacgtttagcgcttccgcttctgcggttaaacggttaacaatttctgccagcgttagcgaaccgtacttctctggttcacgactgccgagcatattaaggtttggtccgttcaaaagcaaaatgcgaaacttgtcagccattgtgcagctatctcctgctaacctcgggtaaaaaacaaaatataccttcgatacgcgcttgtcaccttttcagggttcgaaaaccccttcaggaaaaccaaagtcgcacattataacgatttcgtagcaattggcagctaaatactggtcttatcagggaagattatcaaccgctatcgtaaaaagagtcgcggttgataaacgttatgcggggaactgcacatatccggagcttagcgccaccactggcgaaacttcttgtagcggctggctaaaagtaccgctgccagtccggcataaatcagcggctgcggcgataaaatcttcaccgaccatagataatgtataggggcgaggatcgccaccagatagacgaagttgtgcaatgtttgccaacgacggcctaattttcgttgcatgtactgggttgacgtcgccgccagcgccagtaaaaccagccaactgattaaaccaagcgtgagatacggacggttgattatctcggaaccgagtagcgccagattgttaatgccgagctccagcagcgtatagctggtgaggtgcaacgttgcccaggcaaagcaccataaccctaataaccggcgggtgcgtatcaataatggctgtttagcgtagcgcgccagtggcgtaataagcaaggtggcgagtaaaaacttcaacgccatccgtccggtgaaatgctggatatcctttgccggatcggcgctgaaatagccctgatgtccggcccagaacagccagacaagcggtaaaaaaccggctaaatgcagcgcaactttcagccagcctatctgtttaacgctcagacgcactagaaattctcccgtaagttaagtccgcgatacagcgaggcgacctcctcggcatagccattaaacagcaacgttggctggcgttttacgtcgagtacgccgccggcgccgataaaccgctcactggcctgcgaccagcgcggatgatcgacgtgcgggttcacattggcatagaaaccatattcatctggcgccgccagattccaggtggtcggcggccgctcgcgggtcaattcgatgctcacgatcgatttaatccctttaaagccgtacttccacggcacggtcaggcggatgggtgcgccgttttgcggcggcagcgctttaccatagacgccaacgctcatcaacgtgagcgggtgcatcgcttcatcaaggcgcaacccttcgacatagggataggccaggccgccgccgatgaagcgatctttttgtccaggcatttgttccggcgcatacagcgttttgaaagcgacgtagcgggcgttgctggtgggctccacaagcgcgagcagtttatgcaacgggaagccgacccacggcacgaccatcgaccaggcctccacgcagcgcatacgataaatacgctcttccagtgggaaacgacgggtcaggtcgtcgtgatcgagcgtcaggggtttggcgacttcgccgccgatggtaagcgtccaggggtcagtgcgcaggctgcctgcgttagcggccggatcggctttatcgaggccgaattcataaaagttgttgtagccggcgactttatcttccggggtgagggcgagcttactttgccatgctgcgggtttatcaaaggtcagcgcctttccggcgggcgctggcgggcgatcgtggcctttgaaccaatcaagcaggtcggcgtgggccttcgttgagagcgacattgccgttgcgccgatgccaagcattttcagcacctggcggcgctgcaggttaaataccgattccgccgttacgtcggcttccgtcagttttctggttttcatggcgtcctccgtcatactttttcctaagcatgacggagacggagcgcgatcgcgaatatgtcacgaaaaattgcagattagccgattttgaccagcgtacgtccctggatctggttgttcatgattttgtcggcgaaggccggggcatcggccagggtgatttcggtcgcgctttgcgcgtaaaaagactccggcagatcgcgcaccagccggcgccaggcttctgcgcggcgcgcaggcggggtcattaccgaatcgacgccctgcaggcgtacattgcgcaggataaacggcatcacggtggtcggcagcgcgaaaccgcccgccaggccgcaggccgcgacgcagccgccatagttcatctgcgccagcaccttagccagcactttatcgccgacggtatcgatagcgcccgcccagatttgtttttccagcggacggctctcagcgaactcgtcgcggcccagaatacgctgcgcgccgaggcttttcagatagtcatgggtgctttcgcgaccggaaaccgccgccacctgataacccagatgatgcagcagagcgactgctgtgctgccgacgccgccgctggcgcctgttactacgatctcgccatcctgcggtcgcaccccggcgtcttccagcgccataacgcatagcatagcggtaaaacctgcggtaccgatcgccatcgctttgcgtccgtcgagaccttcaggcatggccaccagccattcgcctttgacgcgggcgcgttcagccaggccgccccagtgattttctcccacgccccaaccggtgagtaatacctgctggccaacgtgaaaacgcggatcttcgctggcgtggacggtaccggcaaaatcgataccaggaatcatcggaaagttgcggataatttttcctttgccggtaatggccaacgcatctttataattgaggctcgaccactgaatatcgactgtcacatcgcctggcggcagcaggttggcatcgatgttttgcaccgaggaaagggttttgccatcctgctgttctaagattaaagcctgcatatgtggttcctcgcggtttgaagattggaaaaattattctgcagactatactcgctaacggcattattacgtggatgtaacgcaataaattgccagatacgccagctttggtagtatgcgtcgcttcagaaagttagtacttacttaagaaaaagtctcaaaaggggcccgaatgcccatcgggtagttattcacacgcggagttaacacagggatgcgattaacgacgaaattctcagcatttgttacgctgctcaccagcctgacgatttttgtcacgctgatcggcgcgtcgctgagcttttacaacggcattcagattaaagttgagaatcgcgtgcaggcggtggcgacgatgctggatagccgcctggtgaccacctcttttgataagctcgaaccgcaaatggacgagctgctcacgccggtagaagtcgaacatattgattttctgctcaacggtaaatcgctttacagccacacccgcggcgacagttaccgtccgctgggcagtaacaaccagtatcgtgaaatgacggtaccctcgctcaaacatcccggaatttcgattcgtctggtctacatggacccgatggtcaattacttccgttcgcttcacgtcaccgcgccgctctccttcgccatcggcttcatggtgctgattatcttcttttcgattcgctggatccgccgccagctggcggggcaagaactactggagctgcgtgcgcggcgtattctcagcggcgagcgcgggccgcaggtgcgcggttcggtacatgaatggccggccagtaccagcagcgcgctggatatgctgctctcggagctgcagtttgccagcgatcagcgaagccgcatggataccctaattcgttcctacgccgcccaggattccaaaaccggccttaacaaccgcctgttctttgataatcaactggcgacgctgctggacgatcaggaaaaggtgggggcgcacggtatcgtgatgatgatccgcttgccggagtttgatctgctgcgtgacaactggggacgggcggcggcggaagaacattacttcacgctaattaatctgctgtctacttttattatgcgctatcccggcgcgctactggcgcgctatcaccgtagcgatttcgccgtcttattgccgcatcgcactttaaaagaggccgatagtatcgccggacagttgctgaaggcgatggatgcgctgccgtcaacgcgggtgctcgataaagacgacacgatgcatatcggcatctgcgcgttccgcagcggccagtctacctctcaggtgatggaacacgccgaagccgccacccgcaacgccgtgctgcaggggagtaatagctgggcggtttacgatgattcgctgccggagaaggggcgcggcaacgtgcgctggcggacgcttatcgagcagatgctgagccgtggcggcccgcggttgtatcagaaaccggcggtcatgcgcgatgggcgggtacatcaccgtgagctcatgtgccgtatctatgatggtaaagaagaggtgattgctgccgagtatatgccgatggtgcagcagtttggcttagcggaagagtacgatcgcctacagattacgcgtttgctgccgttattaagttattggcctgatcaaacgctggcgctgcaggtgaccgtggagtcgctgattcgcccgcgtttccagcgctggctgcgcgataccatgatgcagtgcgaaaaatcacaacgtcggcggattatttttgaacttgcagaggcggatgtttgtcaatatatcggccgtttacacccggtgatgcggttgataaacgcgctgggtattcgcgtcgccgtggttcaggccgggttgacgctggttggcaccagttggatcaagcagctggacgtggaagtgatcaagctgcatcaagggctatcgcgcaatattgaaaaacgcagcgagaaccagttactggttcaaagtctggtggaggcctgtaaagggatgccggtacaggtttttgcgactggagtacgcagtcgcagcgagtggcaggtgctgtcgcaatgcggcgtgaccggcggtcagggggaattttttgccgcctcacagccacttgacacaaatgtgaaaaaatattcgcaaagatactctgtttgatctgccgtttggcgtgatttcacgtagaataacgcgcgccatagtaaagggggtgtgcttgtctacccgccggaatgtcgcaacttacgcaagactgacctttgacaggtacaaacagagcccggagcgcagctgaattattcagcgcagaaggagcttcgtaaatgtttgtaacaaaggaaatgaactgcactaattttcaccgtagcagatgatttttgcgccttgtcgctgctgcgtgtggttggtaaagtaagcggattttgttttccgccccagctttcaggattatcccttagtatgttaaaaaaatttcgtggcatgttttccaatgacctgtccattgacctgggtaccgcgaataccctcatttatgtaaaaggacaaggcatcgtattgaatgagccttccgttgtggccattcgtcaggatcgtgccggttcgccgaaaagcgttgccgccgtaggtcatgaagcgaagcagatgctgggccgtacgccgggcaatatcgcggcgattcgcccgatgaaagacggcgttatcgccgacttcttcgtgactgaaaagatgctgcagcactttattaaacaggtgcatagcaatagctttatgcgccccagcccgcgcgtgctggtgtgcgtgccggttggcgcgactcaggttgagcgtcgtgctatccgcgaatccgcgcaaggcgctggcgcccgcgaagtcttcctgatcgaagagccgatggcggccgcgatcggcgcaggcttgccggtttctgaagcgaccggttctatggttgttgatatcggcggtggtactaccgaagtcgcggttatctccctgaacggcgtggtctactcttcttccgtacgtatcggcggcgatcgctttgacgaagccgtgatcaattatgtgcgccgtaactacggttccctgatcggcgaagcaaccgcggagcgtatcaaacacgaaatcggttccgcttacccgggtgatgaagtacgcgaaatcgaagtgcgcggtcgcaacctggctgaaggcgttccacgcggcttcaccctgaattccaatgaaatcctcgaagcgctgcaggagccgctgaccggtatcgtcagcgccgttatggtcgcgctggaacagtgcccgccggagctggcatccgatatctccgagcgcggtatggtcctgaccggcggtggcgctctgctgcgtaaccttgaccgtctgttaatggaagagacagggatccctgtcgtagttgcagaagatccactgacctgcgtcgctcgtggcggcggtaaggcgctggaaatgatcgatatgcacggcggcgacttgttcagcgaagagtagtcagcctgaaggtctggggcagcttaatggctgcctctggtctttactgacacgagaatacgcatagcctatgaagccaatttttagccgtggcccgtcgctacagattcgccttattctggcggttttggtggcgcttggcgtcattatcgccgacagccgcctgggtacgttcagccagatccgaacgtacatggatacagccgtcagtcctttctactttatctcaaatggtccccgggaactgctcgacagcgtatcgcaatcgctggcgacccgcgatcagctcgaactggaaaaccgcgcgctgcgtcaggaactgctgttgaaaaacagcgatctgctgatgctgggtcaatacaaacaagaaaacgcccgtctacgtgagctgttaggctcgccgctgcgtcaggacgagcagaagatggtgacccaggttatctcgacggttaacgatccctacagcgatcaggtcgttatcgacaagggcagcgttaatggcgtttatgaaggccaaccggtcattagcgacaagggcgttgtcgggcaggtggtggctgttgcgaaaatgaccagccgcgtgctgcttatttgcgatgcgacccatgccttgccgatccaggtgctgcgtaacgatatccgcgtcattgctgccggtaacggttgtactgatgatttacagcttgaacatctgccggcgaataccgatattcgcgtcggcgatgtgctggtgacctcagggctcggcggacgcttcccggaagggtatccggttggagtggtctcctcggtacgtctggatactcagcgtgcgtacacggtgatccaggcccgtccgaccgccggactgcagcgtttgcgctatctgctgttgctgtggggcgccgatcgcaacggcgccaacccgatgaccccggaagaggttcaccgcgttgctaatgagcgactgatgcaaatgatgccgcaggtgctgcctgcgcctgatgctatggggccgcagatgccggcgccggcgacgggcctgacgccgccgtccgcgcaacctctgccagcagggggcaatagtggcaagttatcgtagccaggggcgctgggttatctggctctcgtttcttattgcgctattgctgcagattatgccctggccgcaggacatcaccgtcttccggccaaactgggtgttgttgattctgttgtactggatcctcgcgctgccgcaccgggttaacgtcggtaccggctttgtgatgggggcgattctcgacctcatcagcggttcgaccctcggcgtacgcgctctgtcgttaagtattgttgcctatctggtcgctttaaaatatcagctgttccgtaatctggcgctctggcaacaggcgctggtggtcatgctgttgtctcttgccgttgatatcattgttttctgggcagagtttttagtgatcaacgtctctttccgtccggaagtgttctggagtagtgtagtaaacggtgtgctctggccgtggctattcctgctaatgcgtaaagtgcgtcagcaatttgcggttcaataaaggttgatatgacaactctgtatctggcttctggttccccgcgtcggcaggaactgttaactcagcttggtctctctttcgaacgtctggttccgggtattgaggaacgacgcggcccgcaggagagcgcgcagcattacgttgcgcgtctggcgcgagaaaaagcgctggctggcgtggcgatggcgccgcgcgatctgccggtgttgggcgcggatacgattgtcattcttaatggcgaagtgctggaaaagccgcgcgacgccgggcacgccgcagaaatgcttcgcatgctttccggaaaaacccaccaggtgatgaccgcggtggcgttggcggataagcagcaaacgctggattgcctggtggtgacggaagtgaccttccgtctgctctccgagcaggatatcgctacctacgtagccagcggcgaacctttagataaagcaggcgcatacggtattcaagggttgggtggttgttttgtcaggaagataaatggcagctatcacgccgtagtcggcttaccgctggtggaaacgtatgagttgctgagtaactttaactcactgcgtgaagaaaagggataaagatgacggctgaattattagttaacgtaacgccatccgagacgcgcgtcgcgtatatcgatggcgggatcctgcaggaaattcatattgagagagaagcgcggcgcggaatcgtaggcaatatctacaaaggtcgtgtcagtcgtgtgttgcctggaatgcaggcggcttttgtagatattggcctggataaggccgcctttctgcatgcttccgatatcatgccgcacaccgagtgcgtggcgggtgaagagcagaagcagtttaccgttcgcgatatttccgagctggtgcgtcagggccaggacctgatggtgcaggtggtgaaagacccgctgggtaccaaaggcgcgcgtctgaccaccgatattaccataccttcccgctatctggtctttatgccgggcgcttcgcacgtcggcgtatcgcagcgtattgaaagtgaggccgagcgcgaacgtttgaaaagcgtggtcaccgaatattgcgacgagcagggcgggtttattatccgcaccgcggcggaaggcgtgcatgagcaagagatggcggcggatgcggcctaccttaagcgcgtctggaccaaagtcatggagcgcaaaaagcgcaaccagacccgctatcagctttacggcgagctggcgctggcccagcgcgtgctgcgcgatttcgccgacgctcagttggaccgcattcgcgtggattcacgcctgacctacgaagcgctgctggagttcaccgcggaatacatcccggaaatgaccagcaagctggaacattacagcggccgccagccgattttcgatctctttgacgttgagaacgaaatccagcgcgcgctggagcgtaaagtcgagctgaaatcaggcggatatctgatcatcgatcagaccgaagcgatgactaccatcgatatcaacaccggggcgtttgttggccaccgcaatctcgacgacactatcttcaataccaatattgaagccacgcaggctatcgcgcgccagctgcgcttgcgtaacctgggcggcattatcatcattgattttatcgatatgaataatgaagatcatcgtcgtcgggtactgcattccctggagcaggcgctgagtaaagaccgggtgaaaaccagcattaacggcttctcgcagctggggctggtcgagatgacccgtaaacgcacccgcgaaagcgtggaacatgtactatgtaacgagtgtcctacctgccatgggcgcggtacggtaaagtcggtcgaaacggtctgttatgagatcatgcgcgaaatagttcgcgtgcatcatgcgtatgactcagaccgcttcctggtctatgcttcacctgccgtcgcggaagctctgaaaggggaagagtcccacgcgctggcggaagtcgaaatctttgtcggcaagcaggtcaaagtacaaattgagccgctctataatcaagagcagttcgatgtggtaatgatgtaatcattcagcctgtcgctcccgatgacgtaggggcgggtaaacaggcgggctgaaggataaagcgtaacaggctgacaaggagagatgcgttgaggcgatggcccgggatattactgcttaccgtggcaaccgtggtggtgattgttgcgctgctggtgagcggcctgcgtctagcattgccgcagctaaataactggcgtccccaactgctggaaaaaattaccgcagtatccggagtggcggtcgatgcctcgcagatcaacgccaactgggaaaacttcggcccgacgctggacgttcgcgatattaaagccaccttgaaagacggtggccaaatgacgatcaaacgggttacccttgccctcgacgtctggcaaagccttttacatatgcgctggcagttccgcgacctgaccttctggcagctgcaaattcataccaatacgcccatccagactaacgacgacggcgcaagtctgaagaccgaccgcatcagcgatctgttcctgcgtcagtttgaccactttattctccgcgatagccatttgagcttcctgacgatttccggtcagcgtgctgaactggcgatcccacagcttacctggcttaacggtaaaaaccgccaccgtgccgaggggcaactgagcctttcgagcctcaccggccagcacggcgtcatgcaggtgcggatggatttacgtgacgagaacggcctgctcaacaagggacgtctctggttacaggccgacgacatcgacgttaaaccctggctcgggcgctggatgcaggacaacatcgccctgcagagcgcgcgctttagtctcgaaggttggatgaccatcgataaaggcgatgtcgccagcggcgatgtgtggctgaaaaaaggcggcgccagctggcagggcgataagcatctgcatcagctgtcggtggataatctgacggcgcatatcacgcgcgaaagtcaaagctgggcatttcatatccctgacacgcggatctcaatagacggcaaagcctggccgcgcggcgcgctggcgatggcgtggatcccggcgcaggaagtcggtggtaataacaatcagcgcagcgatgagctgcgcatccgcgccagcaatctcgagcttggcgggctaaccggtctgcaaccgatggccgataagctggcgccgagctttggcgaagtgtggcgaaccacccagccgagcggcaaaatcaacctgttggcattggatatcccgctgcaggcaacggaaaagacccgtttccaggccgactggagcgatctggcgtggaagcagtggaagctgttgccgggagccgagcacttttccggcagcctgagcggcagcgtggaaaacggcgaactgcgcgcgcatatgacccaggcgaaaatgccttatgaaacggtctttcgcgcaccgctggagatagcccagggcgatgcgactctaagctgggagaggaacagcaagggctttatgctggatggccgcgatatcgacgtgcaggcaaccggcgttcgcgcgcgcggcggcttccgctatctgcagccagcaggcgatgagccgtggttaggcatcctggcgggtatcagtaccaatgatggcggccaggcgtggcgctatttcccggaaaatctgatgggcaaagcgctggtggattacctgagcggcgcaattaagggcggccaggcaagcaatgccaccctggtttacggcggcaacccacatcagttcccctatgagcataacgaaggccaattccaggtctcggtaccgctgaagaacgcgactttcgccttccagccggactggccggcgctgaccggactggatatcaaccttaacttcgtcaataacggtttgtggatgaaggcggataaagcgatgctgggcaacgttactgccagcaaccttgacgcggtgatccccgactattcccatgaaaaactgtttatcgatgccgatgttaacggccctggtaaagaggtcggcccttatttcaaacagaccccgctgaaggatacgctcggctcggcgctggatgaactgcagcttgatggtaatgtgagcgctcgcttacatcttgctatcccgcttgatggcgagatgaccacggccaaaggcgatgtacggctgaaaaataacgatctgtttatcaagccgattgacgcgacgctgaagaatctcaatggtcagttcagctttgaaaacggagatttaaaaagcgggccgctaagcgcgacctggtttaatcaaccgttgaacctcaatttcaccaccactgaaggggcgaaagccttcctcgttgacgtcggcatgaacgctaactggcagccgacgcgtaccggcctgctgccgaaagcggtcaatgatgaactcagcggcagcgtcccctgggatggcaaagttgccattgagttaccctatcgcggtagcgcgagctacaaagtcgatatcaacggcgatctgaaaaatgtgagtagtcacttacctgcgccggtgaacaaatcggcgggtgaaccgttgccggtgaaaatcaacgtgaccggcggcttaaacagcttcgatttgaccggaaatatcggcagcaagaaccacgtcaatagccgctggttactgaataacaagctgacgctcgatcgggcgattctgacctccgacagcaaagcgataccttcgctgcctgaagcatcaggcgtcgagctgaacatgccggcgatggatggcgcgcaatggctggcgttgttccagcagggcgccgctaacgaagtgagcagtaatatggccttcccggagcgcgtgacgcttcgtacaccgtcgctggccttcgccggacagaactggaataacgtcagtctggtttcccagcctgacggtagcggctcgaaggtggaggcgcagggcgtgaaatcaacgccacgttgacgatgcataagaatgccccctggctggcggctattcgctatctctattacaacccttccagcgataacagcggcacggcgaaaaaagagagcggtccgctggctgatacccgtctggatttccgcggctggccggatttacagctgcgctgtaaagagtgctggctgtggggacaaaaatatggacgaatcgacggtgacttcgatatcaagggcgatacgctcaccctcagtaatggcctggtagataccggctttggccggctcactaccgatggcgtctgggtgaatgcgccgggcggcgtgcgtacctcgctgaaaggcaagcttcacggcaataaaacggacgacttcgtgaacttcttcggtgtctcgacgccggtgaaagggtcgtcgtttgatgtcgattacgatctgcactggcgcgcgccgccatggcagcctgatgtcgcttcgctgaacgggatcctcaaaagccgcctcggcaaaggcgagtttactgacctgagcaccggtcatgccggtcagttattaaggctattgagcgttgacgcgctgctgcgtaagctacgcttcgatttcagcgacaccttccaggaagggttctggtttgattcgattcgcagtacggcgtggattaaagacggcgtgctgaatacggatgatacgctggtggatgggctcgaagctgacatcgcgatgaaaggttcggtcgatctggtgcgccgtcgtttagatttacaagcggtggtggcgccggaaatttcggccaccgtcggcgtagcggcggcattcgccgtcaacccgatcgttggcgcggcggtgtttgccgccagcaaggtgcttgggccgctgtggaacaaagtgtcgattctgcgctatcgcattacgggtccaatcgatcagccggaaatcaatgaagtgctgcgccaggcgcgcagcaacaaaaagcaatgatttgacgagtacggggaattatcgcactctcaatagagggcattttctccccgtcatctttttcgccgcatggcattcccctgtgtcaggcggcaacaaacgagtagcgtaacgatgagtttgaacctggtaagtgaacaattactgtcggcaaatggcctgaaccatcaggacctgtttgccattcttggccaactggctgagcgccgtctcgattacggcgatctttattttcagtcgagctatcacgaatcctgggttctggaagacagcatcattaaagatgggtcgtacaatattgaccagggcgtaggtgtccgggcggtaagcggcgagaaaaccggttttgcctatgcggaccaaatcagtaaactggcgcttgagcagagtgcccaggcggcgcgtactatcgtccgcgaccatggcgacggcaaagtgcagacgctcggcgcggtggagtacagctctctctataccagcgtcgatccgctgcagagcatgagccgagaagagaaactggatatcctgcgccgcgttgataaggtggcgcgtgctgccgataagcgcgtacaggaagtttccgccagcctgagcggcgtctacgaacttattctggtggcggcaacggacgggacgctggccgctgatgtccgtccgctggtgcgtctctccgtgagcgtgctggtggaagaagacggcaaacgcgagcgcggcgccagcggtggtggcgggcgatttggctatgattatttccttgcgccgctggatggcgacgtaagggcggatgtctgggcgcgtgaagcggtacgtatggcattagtcaatctgtccgcggttgccgcgccagccggtatgctgccggtggttcttggcgcgggctggcctggcgtgctgctgcatgaagccgtcggccacggcctggaaggtgactttaaccgtcgcggcacctcggtcttcagcggtcacatgggcgaattagtcgcctctgaactgtgcaccgtcgtggatgacggcaccatggccgatcgccgtggttcggtcgcgattgatgacgaaggtacgccgggtcaatacaacgtgcttatcgaaaacggcgtcctgaaaggttatatgcaggataagctcaacgcgcgtctgatgggcgttgcgccgaccggtaatggtcgccgtgaatcctatgcgcatctgccgatgccgcggatgaccaacacctatatgctggccggtaagtcgacgccgcaggagattatcgaatcggtcgattacggtatctatgcgccgaactttggcggcggtcaggtggacattacctccggtaaatttgtcttctcgacctcggaagcctatctgattgaaaaaggcaaagtaacaaaggccgtcaaaggcgcgacgctaatcggttccggtatcgaagcgatgcagcagatttctatggttggtaacgacctgaagctggatagcggcgttggcgtgtgcggtaaagaagggcagagcgtgccggtcggcgtcggccagccgacgctgaaagtcgacaaccttaccgttggcggcaccgcctgataacggctggtcccggcggcgcgaagccgctgccgggatgtcaattaacgggtcatcccgcgcccgtgcattccctgatagatcttcgccacctcgacaaaataatccgtcagatagttaatacatacctgcaccttcagcggcagtttgtctttttcggtatagagcgcatagaccggccgcggatccgattgatagctcggcagcaggatctccagttcaccgcgattgatctcgtcgatcgcccacatcagcggaacgtaggccacgccaacgccggcagtcagccagcggatcagcgtcatcggatcgttagtgacgaaacgcccttgtgggatcagacgagtagagatcccctccggggcgataatttcgaactcattatctggccgtacgctatattccagccacgagtggctggcgagatccgctggtttttccgggcatcccgcgtgctgaagatagcttttcgctgcgcagagcaccattggcatcgagcccagccgccgcgagaagaggctggaatcctgcaatgcgccgacgcgtatcaccacgtcgaggccgtcggcaatcaggtctggcgcagggatgccggtcaccagattaatcgataaacccggatattctttgagcatttcggcggttatgcgcgccagcacattctgtgccatagttgaagagctaccgatacgcagcgtgccgatgggggtattgttgaaggcatacagctgttcatggacgtcctgcgcttcaaagagcattcttcggcagccctggtaataaattttacccgcttctgttaagcccaggctgcgggtgctgcggttgagcagctttacctgtagctcgtcttccagtttagcaacggtctggctgatagatgaaacgctcatctggagctggcgtgcggcggcggtgaaagagcccagctcaaccactttggcgaacaccgacatgcgttttagtcgttccattattcactctggcttaaaagtgatttagatcacatattatagataaggctgcaattgttacgttaatatatagttagctacataataaacgcatcacgctaccacctgtacgcttcttatcaaggtcatcatgagtctgtttcctgtcatagtgattttcggcctatcgtttccgccgatcttctttgagctgctattgtcgctagccatcttctggctggtgcaccgtttgctggttccgaccggtatttatgattttgtctggcaccctgcactgtttaatactgcgctgtattgctgtctgttttatctgatatcgcgcttgttcgtttgaggtcgatgtgaaaacactaacaagaaatatcctgcgtactgccatcactgtgatattggttattctggcgtttatcgctatttttcgcgcatgggtgtactacaccgcgtcgccgtggacgcgcgatgcgcgctttagcgccgatatcgtcgccatcgccccggatgtgtctgggctcatttcacaggtgaatgtcaaggataaccaactggttaagaaagaccaggtattgttcgttattgaccaacctcgttaccaaaaagcgctggcggaggcgcaagccgacgtctcctattaccagacgctggctcaggaaaaacgcgttgaagccgggcgccgtaacaagctcggcgtgcaggcgatgtcgcgcgaagagattgaccaggccaacaacgtgctgcaaaccgtagagcatcagctggcgaaagcggtggccagccgcgatttagccaaactggatctcgaacgcacggtgattcgtgcgccagccgacggctgggtgaccaacctgaacgtctacgccggcgaattcatcacccgcggttcgaccgcggtcgctttggtgaaacaaaataccttctacgtgatggcatacctggaagagactaagctggaaggcgtgcgtccgggttatcgcgccgaaatcactccgctcggcagtagtaaggtgataaaaggtaccgttgacagcgttgccgcgggcgtgactaacgccagcagcagcagcgatacaaaagggatggcctctgttgactccaaccttgagtgggtgcgtctggcgcagcgcgtgccggtacgtattcgtcttgaccagcagcagggcaacctctggccgtcgggcaccaccgcaaccgtcgtcattaccggtaaagaagatcgcgacgccagccaggccaacttcttccagaaagtcgccatgcgcttacgtgagtttggttaatcgccatggggacctataccattgctccccggcatctccgctttgccattaagcttgcatgcgcggtggtgctggcgctgtttgtcggctttcattttcagcttgagacgccgcgttgggctgtactgacggcagctatcgtgaccgccggcccggcatttgccgccggcggtgaaccctattccggggcgattcgttaccgtggaatgttgcgtattgccgggacgtttatcggctgtattgccgcgctggcgatcattattctcatgatccgcgcgccgctattgatgatgctggtctgctgtctctgggccggtttctgcacctggatctcctcgctggtgaaggtggaaaactcctacgcctgggggctggcgggttatacggcgctgattatcatcatcaccattcataccgacccgatgctggcgccgcagtttgccgttgagcgctgtagcgaaatcgtcatcgggatcgtcagcgccatcgtagctgacctgctattttccccgcgctccatcaaaaaagagatcgacctcgaactggataacctgctactggatcagtatcgcctgatgcagctttgtgtcgcccatggcgatagcgaggtggtggacaaagcctggggagcgctggtgcgccgtactgccgcactggaaggaatgcgcggcaatctgatcatggaatcttcgcgctggtcgaaggtaaaccagcggctaaaggcgatcaacacgctatcgctgacgctgattactcaggcctgcgaaacctatctgattcagaactcacgcccggagatggtgactgacgactaccgcgagctgtttgccgagcccgtagaaacggtacaggatgtgcatcaacagcttaagcgtatgcgccgcttcctgacctggaaaggtgaacacaatacgccggtcactatttatagctgggtcggcgcggcgacgcgctatctgctgctcaagcgcggcgtggttggcaacaccaaaatcagccgtattgaagatgaagtcctacgcggcgagacggtggtgaaggttgagtccgccgaacgtcaccacgcgatggttaacttctggcgaacctccatttcctgtattctcggcactctgttctggctgtggaccggctggacatccggtagcggggcgatggttatgattgccgtggtgaccgcgctggcaatgcgtctgcctaacccgcggatggtggccttagacttcctctatggcacccttgccgctttaccccttggcgcgttgttcttcctcgtcgtcatgcctgcgacgcagcagagcatgttgctactgtgtatcagccttgccgcaatggcgttctttatcggcattgaggtacaaaagcggcggttgggatcgctggggctttagcgagcaccatcaacattttagtgctggataacccgatgcagttccagtttagccagttcctcgatagtgcccttgggcagattgtcggctgtttcctcgcactgatggtgattctgttagtgcgtgataactcgcaggcccgcaccggacgggtattattgaaccagttcgtctcggcggcggtttcttcgctcactactaacagcgcacggcgaaaagagaaccatttgccagcgctgtatcaacagctgtttttactgctgaacaagtttcccggcgatatcgcccgctttcggttagcgttgacgctgattatcgcgcaccagcgtctacgcgatgccccggtgccggtaaacgaggatctgtcggccttccaccgccagctgcggcgaaccgccgatcacgttatctccgccggcagcgacgataagcgccgccgttactttacccgtctgctggaagagcttgatgtttatcaggaaaaactccttcactggcaggcgtcgccccaggttactgagccggtgcgacggctggtggatatgctgaaaaaatatcaacacgtgctcaccaatagctaacctgcgaaccgacgccccggcgtcggtttttttatcgctatacttatttggtgtagagggacagagcggaaggggcggcgggcaatgactatttatacctttgattttgatgaaatagctgagcaacaggatttctatcgtgagttttcccgcgccttcgcgctaccggataagcaggtggataaccttgacgcgctgtggagcgcggtgacgggagggcgcttaccgttcccgctggagattgaatttgtccatctggatgaaaaacagcgtcgtcgctttggcgcgttaattttgctgttcgatgaagcggaagaggagctggaaggacaactacgtttcaatgcccgttgggcataaaaaagcccccggcaggcggggcaagtcgtcggataagacgacgagggtttatttgtacaactcagcagtcgcgtgccagctgtcgccggtacgagcttcaataatgcggtagctgctggcgccttctttctcggctttagccgcgagttcctggcgcatatccattggcgcgctacctacttgagatacagagatagtgcccattggttgcaggttttgtgcttgatcggcattcacttgctgtacggctgcgcttgcgccgaaagaaagaacagatgccagacccagggatgcgatgataattgcgcttttcataatcttgactccaaccttatatgcagcggcgggagatttcgtatgaacccaggccgctgaagagatactgtttcagttaatgaccgacaatcgttaaagcttatttataaagttcagcagtggcgtgccaatggtcgccggtgcgagcttcgatgatgcgataagaagaagcaccttcttcttgtgcttttttgttcagcatttcatgcatatccatcggggaagaacctaccgcgccgatagatacggtgcccagtgactggcggctttccgcttgagtgctgttgattgaatcagcggcgaaagcgccaaaggacagtacggatagcatgctgagtgcggctacagtggttttgattttcatgatgttcacctcgtcgaattttattattagggggctttgtttcgtgaccctcatcacaaaatcaagtatacactaatcaccaaaaatattaataccatgctaattgttttcagtgtaaataatttccaagaaatgtcgtttttataacgtataagaattagaaatgtcattcatggggtgaatttcatgattatttatatttaaatcaaacagatattgcactttgatcttttgtgcgtttttgccgttatcattcggtaaaggaatgtatagaggaggaaaaccacactaaatgttaaaaaaatgctgctttatttgaaggtttgggggatagccttttgcgggaagaaccctctggcaggaaccagagggggagcgcttagagttcctgttcgaacaggaccagaatcgcgtcgtagagatctttaacggaaaaaccgcgggcagggtggtaaagatagtgtcgtcacccgcgatactacccagaataccttcggctttgcctaaggaatccagcaggcgtgcgattagctgcgccgcgccggggctggtgtgaatcaccaccaccgcatcgttataatcgatgtccagcaccaggtttttcagcgggctggaggtcgtcggcacgccgagctcggcaggcaaacagtagaccatttccattttggcgttacgcgtgcgaacggcgccaaactttgtcagcatgcgggaaactttcgattggttgatgttctcgaaaccttcttcctgcagcgcctgaacgatttcgccttgcgagctgaatttttcttctttaagcagcgatttaaacgctttaaccagttcttcttgttttgccgaactacgcataagtcacccagattatggtggtaaaaacaacatcattatgcatacaagtgcatttttatgcaaataatccgcaaaggaatagcgtaaataatgttatgaaaggcgcatattttagcaaataaccctgatgaggaacatgcctgcatcacagcgggtaaattgctgtaaaagtgaaataaatgttatgaaattgatattgttttgccgagcgagctgggtgtattgtaaccaatagtcgatccggtactacggctttgctggatggccagtctcaggaagaaaaatgcgaatttgctgcatcattgcgcgtaccccgcattcttcagccataattattgtaattgttcatcttgtgaattaaggtccaggcgacggaataacgaaagactatattaaccataataaggagtttaggatgaaagttgcagtcctcggcgccgctggtggaatcggccaggcgcttgccctactacttaagacccaactgccttcaggttcagagctctcgttgtacgacatcgctccggttacgccgggcgtggcggtagatctaagtcatattcccacagatgtaaaaatcaaaggtttctccggtgaagatgccaccccggcgctggaaggcgctgatgtggtgctgatttccgccggcgtcgcgcgtaagcccggcatggatcgttccgacttatttaatgttaatgccggtatcgttaaaaacctggtgcagcagattgccaaaacctgtccgcaggcctgcatcggtattatcaccaacccggtaaataccaccgttgctatcgccgccgaagtgctgaaaaaagccggcgtgtacgataaaaacaaactgtttggcgttaccactctcgatatcattcgttctaatacttttgtcgccgagctcaaaggcaagtcagctactgaggttgaagttccggtcattggcggccactctggcgtcactattctgcctttactgtcgcagatccctggcgtcagctttagcgagcaggaagtcgcggatctcaccaaacgtattcaaaacgccgggacggaagtcgtggaagcgaaagcgggcggcggatcggcgacgctctcgatgggccaggccgctgcgcgtttcgggctctctctggtgcgtgcaatgcagggtgaaaaaggcgttgttgaatgtgcctatgtcgaaggtgacgggcagtatgctcgtttcttctcgcagccgctactgttgggcaaaaatggcgtggaagagcgccagtccatcggtaaactcagcgcttttgaacagcaggcgctggaaggcatgctggatacgctgaagaaagatatcgccctcggcgaagatttcgttaacaagtaatttctccttagcagaaaagccggaaccgtcgttccggcttttttatcgcctcatatccctgccgaatgcgccgtctggcggctaaatctgctaaaatccccgcgtcttaagcccgaagcaatgaggacgttgtgaaaaagatcgaacgaaagcagaccagggaccacattacgcaaatcattcgttatcaaattctttccggagcgatgaaagcgggagatgagctggcgcaggagagtattgccgagcagctggggctttcacgtatgccggttagagaagcgttgcagtcccttgagcaagagggctttctggtgcgcttgcctaaccgccatatgcaggtatcaaagctggtgcctgatgatgttagccatatttttcgtgtgatcgcggtgatggctgccgaattgttcactctggtgccggcaaaccagggtgaattgctgctcgggcgcgcgcaggtcctggcgcagcctggcgacaaaactcgcgaactggaattccatcagttgctgatttcctatcttgataaccgctatctggcgaaggcgtatcagcaatttttggatggatatatctcttatgtcatcctgtatctgaaagacgatagccaggaatcggcactgatactacatgaactggccggagccattagccgcggcgatgcgggcaatattgctcaggcaacacagcgttatttcctcatgcttgcggaaattatgcgtcaacatatgaaggattgggaaagtgcagaagcctaaattagggaaaattaagcttctttcggcgaaagagcaggtcgcggcggtattacgcaaagcgatactgtcgcgggatttagtggaagggcaggagataactctcgaaggcattgcccgcatggtcggcgtttccagcatgccggtgcgcgaagcgtttcagattttagccaccgatggcctgattcaagtccgccccaataaaggcgcggtggtattggggatcaacgagcagacgattcgtgagcattatgaaattcgcgcgctgctggaaagtgaggcggtggcgaaagcctcccgtcccgggacggatatttcgcgcattgcccaggtacactactcagcggaaaaagcgctggccgataataacttcactgaatattccgacctgaatcaggctttccatatggagatctggaacgccgcaggcaacgaaaaaatgaagatgctgctctgtaatatgtggaacggattgtcgatggggtacaaggtgaccgaagcggagtacgccgctatctccatctacgaacataaagagattttacaggcacttgagcagaataatgaagaactggcgcgtctgcgcatgcgcgagcatattattcgctcgatggagaacatgttaacgcgctaccttcctgataccactccgtaatgccaattgcctgtggagcgactacaggcttatttcttattgatcatccctattaatcaccttttgtgacgatctgtacaggatcttgatgcagatcgcactgcgcaatctttcctcaaaaacgcattgacttactttttgcatgggaataatttctccctcgtcaatattggatacaatatcatatatcattgatagggataattataagtatggaaccgattaccatcaccttatgtttgctggtgttcgctatcgtcatgttcgtctgggagaaggtgcctttggcagtgacttccatggtggtctgcgtggcgttagtactcaccggcgtgttggatctgaaacaagcttttgccggttttattgactccaacgtcattcttttcgtcgccatgttcatcgtcggtggagcgttatttgaaaccgggatggccaataaagtcggcggggtgatcactcacttcgccaaaaccgaaaaacagctgattttcaccattatggtggtagtcggcgtgatgtcgggttttctttccaacaccggtacggcggcggtattgatcccggtggtaattggcgttgcggcgaaatcgggttttgcccgctcgcgtctgctaatgccgctggtatttgccgccgcgctcggcggcaacctgtcgctgattggcgcgcccggcaacttgatcgcgcaatcggcgttgcagaatatcggtagcggctttggcttctttgagtatgcgaaagtgggtttaccgatgctgatctgcggcatcctctatttcctgacgattggctataaatttctgcctgctaccgggaatagcggtgaagtcggcagcgtcggcgaacagcgtgattacagcgacgttccgcgctggaaacagatcctgtcgctggtggtgctgatcgccacgatcctcggcatgatttttgagaaacagaccggcattagcctgacggtggctggctgcatcggtgcgttggtgctggtgtttaccggcgtgctgacggaaaagcaggcttataaggcgattgattcacagactattttcatttttggcggcacgctggcgctggcaaaagcgctggaaatgaccggtgctggcaagctggttgccgatcatgttatcggcatgttgggccagaactcttccccgttcatgttgatggtgatggtctttgcgctgtccgtcatcatgaccaactttatgtccaataccgctaccgtcgcgctactggtaccggtgagtttgtcgatcgcggccggtatgggcgccgatccgaaagcggtcctgatggcgacggttatcggcagttcctgcgcctacgcgacgccgatcggcatgcccgccaatatgatggtgctatcggccggcggctataagtttgtcgattacgccaaatccggcctccctctgattatcgtttcgaccattgtcagcctcgtactgctgccaattcttttcccttttcacccgtaatttacggacgctgttctgactaaggagcctttatgagcaaaagtgaacagatatcccgaatgaccgatattatggccaaattcgtgggatataccggcaaagtattgcctgatgacgtcactgcaaaactgaaagagttgcataagaaagagaccagccagctggctgacgtcatctttaccaccatgattgaaaaccagcgtctggccaaagagctggatcgtccctcttgccaggacaccggcgtgattcagtttttggttgagtgcggcgctaacttcccgctgattggtgaactggaagcgctgctgcgcgaatcggtgattaaagccaccgtggattccccgctgcgccacaacagcgtggagacctttgatgaatacaacaccggtaaaaacgtgggtaaaggtacgccgacggtattctgggagatcgtccccgattccgaccagtgcagtatttacacctatatggccggcggcggctgctcgctgccgggtaaagcgatggtgctaatgccgggcgccggttatgaaggcgtaacccgtttcgtgctggatgtcatgaccagctatggcctgaacgcctgtccgccgctgctggttggcattggcgtcgcgacctctgttgaaaccgcggcgctgctgtcgaagaaagcgctgatgcgcccggtggggtcgcgtaatgagaatgaacgcgcggcatcgctggagaaaatgctcgaagacggcatcaacaaaattggccttggcccgcaggggatgtccggtaacacctccgtgatgggcgtcaatatcgaaaacaccgcgcgccatccttccaccatcggtgtggcggtcaacgttggctgctggtcgcaccgcaaaggacatatcgttttcgataaagatttgaattacaccattacgtctcacacaggagtggctttctgatgactaaaaaaatactcactacgccaattaaagatgaagatttagctgatattaaagcgggcgatattatttatctcaatggtcatattgttacctgtcgtgatgtagctcaccgtcgtttaattgaaggcggtcgcgaattaccggtcaacgttgccggcggcgcgatattacatgccgggcccattgtgcggccgattaaaggtacggaagataaatttgaaatggtctccgttgggccaacgaccagtatgcgcatggagaagtttgaaaaagaatttattgcaaagaccggtgtgaaattaatcgtcggtaaaggcggcatgggtaaggggaccgaagagggctgcgccgaacataaagcgctgcattgcgtcttcccggccggctgcgcggtggttgccgcggtctgtgtggaagaaattgaagacgcccagtggcgtgatttgggtatgccggaaaccttatgggtttgccgggtgaaagaattcggcccactaattgtgtcgatcgatacccacggaaataatctttttgagcagaataaggtgatatttaatcagcgcaaagagattgtcgccgatgaaatctgtcagcacgtaagctttattaaataatgccctgttaaatatattgcgcagtaatggcgagaattaatttcagcgataaagaggcttctgactatgtggtctggggaaatccactcggctatcgcggttgttcatcacgccattattgcgctcctccaaaggctattttatgactgatgccgttctgttaggcgaaggtttcaccctgatgttcctcggcatgggctttgtgctggcgtttctgctgctgctcattttcgccattcagggaatgtctgtcgccgttaaccgtctgttccctgagccgcctgccgcgcccaaagcggcgacggccgccgtcgcgcccgccgacgacttcgtccgtttaaagccggcgattgtcgccgccattcaccatcatcgccgccttaatccttaattcacggaggaattcatgaccgttgccattaccgatgtcgtcctgcgcgacgcccaccagtccctgttcgccacccgtctgcgcctcgacgatatgctgcccgttgcggctgcgctcgacgacgtcggctaccgttccctcgaatgctggggcggcgccacctttgacgcctgcatccgcttcctcggcgaggacccgtgggtccgcctgcgcgaactcaaacaggcgatgccgaaaaccccgctgcagatgctgctgcgcggccagaacctgctcggctaccgccactacgccgacgacgtggtggagcgcttcgttgagcgcgccgtcaaaaacggcatggatgtgttccgcgtcttcgatgccatgaacgacccgcgcaacatgaaagccgccctgcaggcggtgcgcagccacggcgcccacgcccagggtaccctcagttacaccaccagcccggcgcacaccctgcagacctggctcgacctcaccgaacagctgctggagaccggcgttgactccatcgccatcaaggacatgtccggcatcctcaccccgcatgccgcctttgagctggtcagcgaaatcaaaaaacgctatgccgtcaccctgcacctgcactgccacgccaccaccggcatggcggagatggcgctgctgaaggctattgaagccggcgtcgacggcgtcgataccgccatctcctcgatgagcgccacctacggccacccggccaccgaggcgctggtggccaccctcgccggcacgccgtacgacaccggcctcgatatccacaggctggagagcatcgccgcctacttccgcgaggtgcgcaaaaaataccatgccttcgaaggccagctgaaaggcaccgacagccgtatcctggtcgcccaggtgccgggcgggatgcttaccaacctcgaaggccagctgaagcagcagagcgccgcccaccgtctggatgaagtgctggcggaaatccccgcgtgcgcgaggacctcggttttatcccgctggtcaccccgacctcgcagattgtcggcacccaggcggtgctcaacgtgctgggcggcgagcgctacaaaaccattgcgaaggagaccgccggtatcctgaaaggcgaatacggccacaccccggccccggttaacgccgccctgcaggcgcgggtgctcgacggcgccgacgccgtaacctgccgtccggccgacctgctgaagccggagctggccgcgctggaagccgacgtgaaacgccaggcgcaggagaagggcatcacgcttgccgaaaacgccatcgacgacgtgctcaccgtggcgctgttcccgcaaatcggcctgaagttcctcgaaaaccgccacaatccggcggcctttgagcccgtgccgcaggtggaagaagccacctctgccgcgccggcaaaagccgccgcctccggcgtctacaccgttgaagtggaaggcaaagccttcgtggtcaaggtcagcgacggcggcgatatcagccagctcagcgcggctgcgccggtagccagcgcgcccgctgccgccccggccccggctggcgccggcaccccggtgaccgcgccgctggcgggcactatctggaaggtgctggccagcgaaggccaggcggtggcggaaggcgaggtgctgctgattctggaagccatgaagatggaaaccgaaatccgcgccgcgcaggccggtaccgtacgcggtatcgcggtgaaatccggcgatgcggtggcagtcggcgacaccctgctgcagctggcgtaaggacgaggagcgcaaatggaaagtctgaacgccctgattcagggcatggggctgatgcacctggggccggccaggcggtgatgctgctggtcagcctgctgctgctgtggctggcgattgctaaaaagttcgagccgttactgctgctgccgattggcttcggcggcctgctctccaatatcccggaggccgggctggcgctgagcgcgctggaaaacctgctggcccatcacgacccggtccagctggcggtgattgccgcgaagctcaactgcgcgccggacgtccacgccatcaaggaagcgctggcgctggccctgccgtcggtacaggggcagatggagacgctggcagtggacatgggctactcctccggggtgctggctatcttctataaggtggcgattggctcgggtatcgcgccgctggtgatctttatgggcgtcggggcgatgaccgatttcggtccgctgctggccaacccgcgcaccctgctgctgggggcggcggcgcagttcgggatcttcgccaccgtgctcggggcgctgacgctgaactactttggctttatctccttcaccctgccgcaggcggcggccatcggcatcatcggcggcgccgacggcccgacagccatctatctgtcgagcaagctggcgccggagctgctgggggccatcgcggtggccgcctactcctayatggcgctggtgccgctgatccagccgccgatcatgaaggcgctgaccagcgacaaagagcggaagatccgcatggtgcagctgcgtacggtgagcaaacgcgagaagatcctcttcccggcggtgctgttgctgctggtggcgctgctgctgccggacgccgcgccgctgctggggatgttctgcttcggcaacctgatgcgcgaaagcggagtggtggatcggctgagcgatacggtgcagaacgcgctgatcaatatcgtcaccattttcctcgggctgtcggtgggggccaagctggtggcggacaaattcctgcagccgcagacgctggggatcctgctgctggggtgatcgccttctgcgtgggcaccgcggccggggtgctgatggcgaaactgctgaacaggttcagtaagaacccgatcaacccgctgattggttcggcgggagtgtcggcggtgccgatggcagcaagggtgtccaacaaggtgggtctggaagcggacgggcagaacttcctgctgatgcacgcgatgggcccgaacgtggccggggtgatcggctcggcgatcgccgccggggtgatgctcaagtacgtgctggcgatgtaaaccggtacccttcccggatggcggctcgcgccttatccgggctaccggtgatcccgtagcccggctgggcgcagcgcgagccgggaattttccctaaggaggatttgatgaatgaaaccgtagcattacgtcctggcagcaggtcatcggcaaaagagggggtagttgatgacaccctggcgtcgctggaggagcttgaacaactacacccggctctgtatctgctggcgcatccgtcaatcgactgtggcaaccatgatttctttgtctgttgttatgacgcaggtgtacagcatgcgcagatcggcgtggctgaaacgatagcggcgttgcttgattcgcgggcgcatgagcagcaaaggagcggcctgctttgcgccgccgccgggcatctggatgcgctgcgccagccgctgacgcataatcgtttatgcgatctggccgggcagatgtgcgccagcatggcgcaggctgatagtgaatcgcgcagcggatactacagcgtacgcagtatctcgctgccggtgtatcgacgattgctgcgggacaaccattcgcacagcgtttgcttacaacagtcgctgctgcacttgctggcctggaagagtgaatcgccgtgggcgcggcagcaggcgcaacggctgctgtggcagggcggggttctcggcgagagaggagaattagcgttactgacgctggatgatgaactgcgggagcggcaggtccgctggccatcattatggtcgttgctggcggtgaccgggtttctggccagattcccggccgggccgctgtttgccgattaatcgcgctccgatgaaggagcgctaatcgttaatttgtcgccggatattcctgtaccgccacatgcagggtcattttcttatcatcacgcatgatgacaaccggaatttctgaacccgggcgaatttccgcgacctgatccatggtttccagcgccgagatcgccggtttatcgttcaccgagatgatcacgtcattagcgcggatcccagcctgcgccgccgggccatcaggtgcgacatcattgacgacgatcccctggatctgatccatgccgccgctctgtgcatgcatcggcgcgatttcgcggccgctgatcccgatgtaaccgcggatcacccggccgtcgcggatcagtttgtccatgattttggtcgccagctggaacgggatggcaaagccgatcccttccggcgtttcgccgtcattgctcttatcgaacgagagggtgttaatacccatcagttcacccagcgagttgaccagcgcgccgccggagttcccgtggttgatagaggcgtcggtttgcaggaaattctgccgcccggtggggttcaggccaatacgaccggtcgcgctgatgatcccctgggtgatggtttgtccgaggttatacgggttgcctatcgccagtaccacatcgccgatgtgcggaacgcgtttcgggttaatcgggatgaccggcaggccgccgctggcgtttattttgagcaccgccaggtcggtcagggtatcggaaccgaccaacagggcttcaaatacccgtccatcctgcagcgcgatgattatctgatcggcatcgttgatgacgtgcttgttggtgaggatatatccgcgttggtccatgataacgccggagccaagcgtcagctggttatggctggtgctgttcagcgcgcggttatagacgttgaccaccgccggcgcggcgcgtcttaccgcagcattatagctggcgggcgattcgtcagcggtatcgctcggcgtcgccgatgagagctgccactggcgcagcgaaggcatcgccgccagcagaatgccgccgacgattaaaccgataaggactgaacgtaaaagctttcctggcatgatgcgaatatcgttaattaatgggcaggcgcagcatagcatgacttatccggacaccgcacgacgcgcacgatgtccgggaacgaccgtcagcgtagcagcagataaatgctttcgttaccgcgcagcacattaagcgcgatgacggccggtttggtttccagtaccttacgtagctccgcgatggaacgtacgcgctggcggttgaggccgataatcagatcgtctttatgcaagccaacctgagccgccgcgctgcctttatcgacgttatcaatagtcacgcccttcgtgccgtctttcaactggccatcgcttagcgccgctccctgcagggccgggataatcagatcggcagtggcggtggaagaggtgctcttatccagcgtcacttcgacatccaacggtttgccgtcgcgcagtagccccagttttactttagtaccaggggcggtagtagcaatacgcgaacgcagctcggcgaagctgcttagcggtttgccgttcatgctgacgataacgtcgccggatttaattcctgcttttgcggagcctgaattggccaggacttcgcttacaaaggcgccacgctgagcgttgatattcatcgctttggcgatatccgcgctcatttccatgcctttaatacccagcaggccgcgtttgatttcgccatattgaataagctgatcggcgagggtcttcgccatgttgctcggaatggcgaagccgataccgatgctgccgccgcccggagccagaatggcggtattgatgccgataagctcgccgttaagattcagcagcgcgccgccggagttgccgcggttaattgaggcatcggtctgaataaagttttccagcccttcgagattaaggccgctacggcccagcgcggagatgatgccggaagtggcggtttggccgaggccgaaggggttgccgacggcaacggcgaaatcaccgacgcgcagcttgtcggaatccgcgatggcgatttgcgttaaattgctgggttttaaaacctgcagcagagcgatatcgctctgttcgtcgctgcctaccagtttggcatcgaactcgcggccatcgttcaactgaatgctaattttctgcgcctggcttattacgtggttgttggtcagcacgtagcctttggccgcgtcgataatcacccagagccgaggccttcaaacggctgcgcctgctcttgcggggcattgtcaccgaagtattttttcagctcttccggcatattctgcaccggcgaggcggtgccttctacctgcacgctcaccaccgcaggcaatactttttccagcatcggcgcgaggctcggtagcgcgccctggcctggaacctgggtcggcaaggatgccgccgccggaggcagggcggacaacgataacccaatgcttaacgctaacgcactcaacagcaaagtctgtttcttcattagatgctggctctcgtaacctgaggtgtatggaaaagacgtcccgaatgatttgatgttattgaattttcgaccggctaacaatgtggtcagtgtttaaattgtagctgggatgtggggaagacgggcgcggaaggcgcgcccggtaaacatttttacgcagacagcgggatcagtcgcgttttacgccaccgcgcagcaggccggatgcgccttcagaataatcgcgcggcatctgtaccggcgcctgatcgttgctggcttcggactccgcgaggcgattgcggaacggattggcgtccgccatagcgtccggcagcagactgctggagctttttgccatgtgctgatacagctgacggtagtcatccgccatgttgtccagcagttctgcgctgcgcgcaaaatggctgaccagctcttcgcgatactcttcaagctctgctttattcttttccagttcgaactgcagcgcttgttgctgacgcaatttgcggttaccaaaacgcatggcgacggcaccgatgatgataccgacgactaatccaattagcgcgtattcccaggtcatgaacatctcccgttgttttgtggttccgtagggtggctgttaggctctccgcctgcgcccgatagtgccactataaccgctaattccacagaagtggaatcctggcgtatcatcgcgtactgtagaaccgcctttttttcgtcaatcgtgggccacggcgccacggttttcaaggaataacaataagatcatgcaaagcctgtccccaacatcgcgttaccttttagctctcgaagagggcagccatcaaccagacgaagtccaacgagaagcggtcagccgcctcgataccatctatcgtgaactgcaggataaaccagccgccgcagcgcctgcgggcggcgggctgcgggcgagattcggcaaactgctcggcaaacgcgaaccagcggcggaagcgactgccgtacgcggcctgtatatgtggggcggcgttgggcgcggtaaaacctggctaatggatatgttttatcaaagcctgccgggcgagcgtaaacagcgcctgcatttccatcgctttatgctgcgcgtacacgaagagttaaccaccttgcagggcatagcgacccgctggaaatcgttgccgatcgctttaaagcgcaaaccgatgtgttgtgctttgacgaattttttgtctccgatatcaccgatgccatgctgctaggcggcttaatgaaagcgctgttctcgcgtgggattacgctggtcgctacctcgaacatcccgccggatgaactctaccgcaatggtctgcaacgcgcgcgtttcctgccggcgatagacgccatcaagcagcattgcgacattatgaacgtcgatgcggggattgattaccgcctgcgcactttaacccaggcgcatctgtggttgtcaccgctcaatgccgagaccagccagcaaatggataaactctggctggcgctggcgggggccaaacgcgagcagatgccgacgctggaaattaaccaccggccgctgccgacgttgggcgtggaaaaccagacccttgcggcgtcgttcgacacgctgtgcgtggatgcgcgcagccagcatgattacatcgcactgtcacgcctgttccacaccgtgatgttgttcgatgtgccggtgatgacgacgcatcttgagagcgaagcgcggcgctttatcgcgctggtggatgaattctacgaacgccacgtaaaactggtggtcagcgcggcggtgccgctgtatgagatctatcagggcgaacgcctgaagtttgagttccagcgctgtttatcgcgcctgcaggaaatgcaaagcgaagagtatctgaagcaaccgcacatgccctgaatccagccttcttctcacattgagaaaaacctgctgcaaatcacataaaggggtcgatctttggcccctacttctctataatcttgcgaccccacgttacgagaaggttttttttcccgaaatcttctatgtgctggcataggctattcgaaggggtaggtttgccggactttgtcgtgtgaacctcaactgactaaacgtttgggtgttcaccaacgtgtaacttatttatttgggtaagcttttaatgaaaacttttacagctaaaccagaaaccgtaaaacgcgactggtatgttgttgacgcgaccggtaaaactctgggccgtctggctactgaactggctcgtcgcctgcgcggtaagcacaaagcggaatacactccgcacgttgatactggtgattacatcatcgttctgaacgcagaaaaagttgctgtaaccggcaacaagcgcgaagacaaaatgtactaccaccacactggccacatcggtggtatcaaagaagcgacctttgaagagatgattgcccgccgtcctgagcgtgtgattgaaatcgcggttaaaggcatgctgccaaaaggcccgctgggtcgtgctatgtaccgtaaactgaaagtttacgctggtaacgagcacaaccacgcggcacagcaaccgcaagttcttgacatctaatcgggattataggcaatggctgaaaatcaatactacggcactggtcgccgcaaaagttccgcagctcgcgttttcatcaaaccgggcaacggcaaaatcgtaatcaaccagcgttcgctggaacagtacttcggtcgtgaaactgcccgcatggtagttcgtcagccgctggaactggtcgacatggttgagaaactggatctgtacatcactgttaaaggtggtggtatctctggtcaggctggtgcgatccgtcacggtatcacccgcgctctgatggagtacgacgagtccctgcgttctgaactgcgtaaagctggcttcgttactcgtgacgctcgtcaggttgaacgtaagaaagtcggtctgcgtaaagcacgtcgtcgtccgcagttctccaaacgttaattgttttctgctcacgcagaacaatttgcgaaaaaacccgcttcggcgggtttttttatggataaaacggctgttatccacaaagaaatggtctgttcttaccactttttcagcatttccagaataccctcaccacaacgtccgcaaaatctggtaaactatcatccaattttctgcccaaatgctggtggttgttcattttttagttaatcaatgaacatatcgtcgccgtgcgaatggggtttatacatctggctggccatgcgtggtcggcagcagtaaaaattctgaatatacctggaggttttcatggctgtcgctgccaacaaacgttcggtaatgacgctgttttctggtcctactgacatctatagccatcaggtccgcatcgtgctggccgaaaaaggtgtcagttttgagatagagcacgtggagaaggataacccgcctcaggatctgattgacctcaacccgaatcaaagcgtcccgacgctggtggatcgtgagctcactctgtgggaatcccgcatcattatggaatacctggatgagcgtttcccgcatccgccgctaatgccggtttacccggtggcgcgtggtgaaagccgtctgtacatgcaacgtatcgagaaagactggtattcgctgatgaacaccatccagaccggtaccgcggcccaggctgatgccgctcgtaagcaactgcgcgaagaactgcaggcgattgcgccggtctttactcagaagccttacttcctgagcgacgaattcagcctggtcgattgctacctggctccgctgctgtggcgtttgccggttcttggcgtagaactggtgggtgctggcgcgaaagagcttaagggctatatgactcgcgtcttcgaacgtgattctttcctcgcttctttaactgaagccgagcgtgaaatgcgcctcggccggggctaaataatggatgtctcacagctgacgccgcgtcgcccgtacctgctgcgggcgttctatgagtggctgctggataaccagctgactccgcacctggtcgtcgatgtgacgctgccaggcgttctcgtgccgatggagtacgctcgcgacggccaaatcgttctgaacattgcgccgcgtgcggtgggcaatctggaactggcgaatgacgaagtgcgctttaatgctcgcttcggcggcgtaccgcgcaacgtttccgtgccgctggctgcggtactcgctatctatgcccgtgagaacggcgcaggaacgatgtttgaacctgaagcggcttatgacgaagatgtcagcagcctcaacgatgatgacgtcgtgtctgagagcgaaaacgaaacggtgatgtcggtgattgatggcgataagccggataatcacgatgacgatcctgacgacacgccaccgccgccgcgcggtggtcgtccggcgctgcgcgttgtgaagtaaagcctgacaggccctccggggcctgttttttttgctcctgcttaaccacgatcaagcataaaaaaagcccggtggcgttaaccatcgggcttttctgtgtagagactcagggtctaatcagacttcaagatagttgaggatcccgtccgccgctttacggccttcggcaatcgccgttaccaccaggtctgagccgcgaacgatatcaccgccggcaaagattttcgggttgctggtctggaacgcgttgtcgctgccttccggggcgatgatgcggccctgagaatccagctcgacgctatgtttcgccagccattccatgctgtgtggacggaaaccaaacgccatcaccaccgcgtctgccggcaccacgtgctcggaaccggcgacgatttccgcgcgacggcggcctttcgcatccggctggcccatttcggtgcgcgccattttcacgccgcacactttgccgttggcattcacttccacgcccagcggctggacgttgaactggaattcgacaccctcttcacgcgcgtttttcacttcgcgtttggaacccggcatgttttcttcgtcacgacgataggcgcagataacgtgcgccgcccctgacgaaccgaggtccgcacgcagtccatcgcggtgtcgccgccgccgagaaccaccacgcgtttgccttccatactgacgaacggttcgtgcgccgtttcgccaaagcccatgatctgtttggtgttggcgataaggaacggcagtgcgtcatacacgccgttggcatcttcgttttccagtccgccgcgcatggactggtaggtgcccacgcccagaaatacggcatcgtactctttcagcagatcgtcgagctggacgtcacggcccacttcggtattgagccggaactcaatccccatgccggtgaagatctcacggcggcgggtcatcacctctttttccagcttaaacgccgggatgccgaaggtcagcagaccgccgatttccggatgacgatcgaaaacgatcgcctttacgccgttacgggtcagcacatccgcgcaggccaggcctgccggaccggcgccgataatggcgacggttttaccggtttgcttcacgccggacaagtccggacgccagcccatctcaaacgccttatcgttgatatagcgttcaatattgccgatggtcaccgcgccgaactcatcgttcagggtgcaggaaccttcgcacaggcggtcctgcgggcagacacgtccgcagacttccggcagggtgttggtctgatgcgacagttccgccgcttcaaaaatacgcccctcgttggccagtttcagccagttagggatgtagttgtgcaccggacatttccattcgcagtacgggttgccgcaggagaggcagcgatctgcctgcgccttggcctggccttctgaaaacggctcgtaaatttctacaaattcaattttacggatcttcagcggtttctttggcggatcaacgcgctgcaggtcgataaattggtatacgttctgactcatcttaacccttactgcgcctgcacccgcagctcagctgcggaacgactacggtgacccaacagtgctttaacatcgctggacttcggtttaaccagcgcaaacttcgccgcgaaggccggccagttggcgaggatctcttcgccgcgctgcgaaccggtaagctggacgtgttcggtaattaagccacgcaggtgctcctcatggatagccagcgtgtccacgtccagaacttccaccagttcggggttaacgcgtttgcggaagtcgccatcttcatccaggacgtaagcaaagccgccggtcatacctgcgccgaagttcacgccggttttccccaggatacagacgatgccgccggtcatgtattcacagccgttgtcgccgatgccttccaccacggtgatggcgccggagttacgtaccgcaaagcgttctcccgcgcgtcctgccgcgtacagacgaccgccggtcgcgccatacagacaggtgttgccaatgatgcttgcttcatggctacggaaggcggagccgaccggaggacgaatcgacagcagaccgcccgccatgcctttacccacgtagtcgttggcgtcgccggtcaggtgcagctcaacgccgccggcgttccagacgccaaagctttggcccgcggtaccgctaaagtgggcggtaattgggtcggcggccagcccctggtcgccatgagtctgggcgatataaccggacaacgacgcgccaacggaacggtcggtgttacgaatatcgaaccagaacgttttgctctgtttgttatccacatacggcttagcctgctgcagcaactgcgcgttgagcacgccgttatcgaacggcgggttgctctcggtgcagtacagcgccttgcctggcagcggctcagcggtttccagcagtttgccgagctccagtttctgctgtttcgctgtaaagccttccagttctttcagcagatcggtacggccgatcaggtccaccagacgcttcacgcccagctgcgccatcagctcgcgggtttcgcgggcgatgaattcaaagtagttggtcactttgaacggcagaccgtggtagtgattcttacgcagtttgtcgtcctgggtcgctacgccggtggcgcagttgttcaggtgacagatacgcaggtatttacagcccagcgcgaccatcgggccggtgccgaagccgaagctttccgcgccaaggatcgccgctttgatgatatcgaggccggtcttcaggccgccgtctacctgcaggcgaattttatgacgcagaccgttggcgaccagcgcctgttgggtttccaccaggccaagttcccacggacagccggcatatttcaccgatgaaagcgggctcgccccggtaccgccatcgtagccggcgatagtgatcaggtctgcgtaggctttcgccacgccggtggcgatagtgccgacacccggctcggaaaccagtttgacggaaatcatcgccttcggattgacctgcttgaggtcgaaaatcagctgcgccagatcttcgatagagtaaatatcgtggtgtggcggcggggagatcagcgtcacgccaggtaccgaataacgcagtttggcgatataaggcgtcactttgtcacccggcaactgtccgccttcaccaggtttcgctccctgggcgactttaatctggatcacgtcggcattaaccaggtaggcaggggtaacgccgaaacgaccggatgccacctgcttaatacgcgagactttgttggtgccgtagcgtgccgggtcttcaccgccttcaccggagttggagaagccgccgatgctgttcatcgcttccgccagtgattcatgcgcttccgggctcagcgcgccgatagacatggccgcggtatcaaagcgtttaaacagctctttcgccgattccacttcattgatgcttacggcttcatcgcctggattgagcgccagcagatcgcgcagcgtggctgccgggcgttcgttaaccagcttggcgtattcctgataatcacggtattcgccgctctgaaccgcctgctgcagggtgcgaacaacgtccgggttgtaggcgtgatattcgccgccgtggacatatttcagcaacccgccctgagccagcggtttacgcgccagccatgcgcgtttcgacagattcagcaggtcctgctggaagtcgtcgaaaccggcgccgccgatgcggctcactactccctggaagcagaggtcggccacgtcgcgatgcagaccgaccgcttcgaacagcttcgagcagcggtaggaggcgatggtcgagatccccatcttcgacatgattttgtacaggcctttgttgatgccgttacggtagttcagcatcaccgcacggtattctttatcgatagctttgctatccaccagcttcgccagggtttcataggcaagatacggatagatagccgtcgcgccaaagcccagcagcaccgcaaagtggtgcggatcgcgggcgctggcggtttcgacgatgatgttagcgtcgcagcgcaggctcttatcgacgaggcgcgtctggatggcgccaacggccatcggcgccggtaccggcagacgatctttcgcgatgttacggtcggacagcaccagcagtacggtgccgttacgtaccatctgttccgctttatcgcacagcgcttttaccgtctcggccagcgtggtttcgttggcatcaaaggtaatatccagggtgtcggcgcgatagtgctcctcttccatggtggtcagctgtttaaagtcggagtacagcaggatcggcgatttgaagctcaggcggtgcgcctggccttccgcttcgcagaagacgttcatttcacggccgatactggtagcaagcgacattacgtgcgcttcacgcagcggatcgataggcgggtttgtcacctgggcgaactgctggcggaaataatcgtaaatgatacgcggctggctggatagcacggcgaatggggtatcatcgcccatcgaaccgaccgcttcctggccattttccccaaggacgcgcaggacggagtccagctcttcggcgctgtagttaaactgtttctggtagctggcgagcgtgtcgtcatccaactgacggctgccgacttcttcttccggcaggtcttcgaacggcaccagacggcggacgtttttctccatccactctttgtacggatggcggcttttcagatcgttatcggtttccgccgagtgcagaatgcgcccgctgcgggtatcgatgaccatcagctcgccaggcccaacgcggcctttttccatcacctcatcaggctggtagtcccagataccgacttcagacgcgcaggtgatgagtttatctttggtaatgacgtagcgcgccggacgcagaccgttacggtcgaggttacaggcggcgtagcgaccgtcggacatgacgatgcccgccgggccgtcccacggctccatatgcatggagttaaaatcgaagaacgcgcgcaattccggatccatgtccgggttattctgccaggctggcggtaccagcaggcgcatcgcgcggacgatatccatcccgcctgccagcagtagttccagcatattatccatcgagcttgaatcagagccggtttcgttaacgaacggcgcggcgtcatgcaaatcggggatcagcggagtctggaatttataagtacgggcgcgggcccactggcggttaccggtgatggtattgatttcaccattatgcgccagatagcggaaaggctgcgccagcggccagcgcggcacggtattggtggagaagcgctggtggaacaggcagatggcggattccagacgcaggtccgcgaggtccaggtagaagcgcggcaaatccgccggcatacacagacctttatagatattaaccaggttcgacaggctacaaacgtagaaatctttgtcttcctgcagacgcttttcaattcggcggcgcgcgatgaacagacggcgttccatatcgcgcggacgccagcctgccggggcgttaacaaaaatttgttcaatacgaggcagcgaggagagggcaatttcaccgagcacgccttcattggttggcacatcgcgccagccaacgatagacaatgtttcgcgttgcagctcttcttcaacgatacggcgcgcagcgcttgccagctcggggtctttattcaggaacaacatcccgacggcatagtttttggctaagcgccagccgcgctcttccgccacaatccggaagaaacgatcgggtttttgtaacagcaggccgcaaccgtcgccggttttaccatcggcaaggatcgcgccgcggtgctgcattcgggccagtgcgtgtatagcggtgcgcactaccttgtggctaggttcgccttctatgtgggcgatcaggccgaaaccacagttatcccgctcaagggatttgtcgtacaacatatcagtgaacctccccaggctctacgggacgcccccttaatcgattgcgcgcaaggcacagcaagagcatggcgacggggtaagggcatctttgcctacctcgcattcgccctctttaaatccttttcgcatcggtacacaagtttgaggacttgctattaagagggaatctcaattactgcataaatatgatgagcagagcgctcatccagaaagcttccagcggattcccaacttagcgagaatccacacttacgtcaaatggcaatcttatttatacaaaagtgtgctaagaggtgtttaattttatgattttaaaagaaattgttgtttttttaaaggcatataaactctcagggatgcgtaatctagtgtgatctgtctcactatatccgcagcctaagattacctttctgtgctgaattgtatttttatagcagagtatttgactgctggttatcttaatggcaggaaataaaactgttttttgctgcgacaaagataattgaaactcagcattgaagtataagtaaatgttattaccgcgggtgtgaatgaaactgcgtttattttgatttaatatgcaatgaggtaagcggccgcgctgacgattgatccaggtcatcgccgtcggaggctaaaaatggcaggcttggcccctttcttgaggccggtctatcagattatgcagttacaaaaattagtcaacatgtttggtggggatcttacgcgccgctacggcgaaaaggttcataaactgacgctgcatggtggatttagctgcccgaaccgggatggcacaattggccgcggcggctgcacattttgtaatgtcgcctccttcgccgacgaggcccagcagtaccgttcgattgccgatcagctggcgcaccaggcgcagttggttaaccgagcgaaacgctatcttgcttatttccaggcctacaccagcacctttgccgaagtacagctgctgcgttcaatgtatcagcaggcggtgaaccaggcgaatatcgtggggctgtgcgtcggcacccgccccgactgcgttcccgatgcggtgctggacctgctcagcgaatatcgggagcagggctatgaaatctggctggagctgggattgcagaccgcgcatgataaaacgctgcatcgtatcaatcgcggccatgactttgcctgctaccagcgcaccacccgactggcgcgcgaacgcggattaaaggtctgtgcgcatcttatcgtcggcctgccgggcgaaacccagcagcagtgcctgcacaccctgcaacgggtggtcgacaccggcgtcgatggtattaagctgcacccgctgcatattgtgaccggcagcatcatggcaaaagcctggcaggcgggtcgcctgaacggtattgagctggatgactatacggtcaccgccggtgagatgattcgccataccccgccggaggtgatttaccatcgcatctcggccagcgcccgtcgcccaacgctactggcgccgctgtggtgcgaaaaccgctggaccggtatggtcgagctggacaaataccttaatgcccatggcgttcagggatcggcattgggacgccgtggagccagcccgcctgatgccccacatccttaacggctgattaccgccgcattttttgcacaacttacagcgtaatgttcagaattgggtattattgtgcggagttggcgataaggaatccctcatgaagcaaattcgtatgctggcgcagtactatgtcgatctgatgatgaagttgggtctggtgcgcttttcaatgctgttagctctggcgctggtggtgctggctatcgtggtgcagatggccgtcacgatggtgctgcatgggcaggtggagagtatcgatgtcatccgctctatcttcttcgggctgctgattaccccctgggcggtctattttctgtcggtagtggtcgaacagttggaagagtcgcgtcagcgactctcgcggctggtggaaaagctggaagagatgcgcgagcgcgatcttaagcttaacgtacagctcaaggataatatcgcccagttgaaccaggaaattggcgaacgtgagaaagcggaagcggaacgtgaaaccacgctggaacagctgaaaatagagatgaaagagcgtgaagagacgcaaattcagctagagcaacaatcctctttcctgcgctctttccttgatgcctcaccggatctggttttctatcgtaacgaagataaggagttctccggctgtaaccgggcgatggaactgttgaccggtaaaagcgaaaaacagctgattcacctcaaaccgcaggatgtctatagcgaagaagccgcggtaaaagtgctggagaccgatgagaaagttttccgccacaatgtctcgctgacctacgaacaatggctcgattatcccgatgggcgtaaagcctgctttgagatccgcaaggtcccctactatgaccgcgtgggtaagcgccgcggtctaatgggctttggccgcgatattaccgagcgtaagcgctatcaggacgctctggagcgcgccagccgggacaagaccacctttatctcaaccatcagccacgagctgcgtacgccgctcaacggcatcgttgggctcagccgcatcctgctggatactgaactgaccaacgagcaggaaaaatatctgaaaactatccatgtttctgcggtgacgctgggaatatcttcaacgatattatcgacatggataaaatggaacggcgcaaagttcagcttgataatcaggaggttgattttaccagcttcctcgccgatctggagaacctctcaggcctgcaggcgcagcagaaaggtttacgctttgtgatggagcccactcagccgctgccgcataaggtgatcaccgatggtacgcggctgcggcagatcctgtggaacctgatcagcaatgcggtgaagtttacccaacagggcaatgtcaccgtgcgtgtccgctatgacgaaggcgatatgctgcacttcgaagtcgaggactccggtatcggtattccgcaggcggagcaggacaaaattttcgccatgtattatcaggtgaaagatagccacggtggtaaaccggcaaccggtaccgggattggcctggcagtgtcgcgccgtctggcgcgcaatatgggcggcgatatcagcgtgaccagccagccggggcaaggggcgacgtttaccttgaccgtacacgcgcaggcggtagctgatgaagtcgaagatacgctggccgaagacgatatgccgctgccggcgctgaacgtgctgttggtggaagatatcgaactgaacgtgattgtcgcccgttcggtgctggaaaaattgggcaacagcgtggatgtggcgatgaccgggaaagccgcgctggagatgttcgaacctggggaatacgacctggtgctgctggacattcagctaccggatatgaccggcctcgatatctcgcgacagctaaaacaacgctatgccgccgatgagctgccgccgctggtggcgcttaccgccaacgtcctgaaggacaaaaaagagtaccttgatgccggcatggatgatgtactgagcaaaccgctgtcggtaccggcgttaactgcgatcatcaagaaattctgggatgcgccggaaggcgacggccatgagccgcctgcggtggatgtggcgaaatcggcatcggtactggataccgatatgctggagcaatatatcgagctggtggggccgaagctgattaccgacgggctggcggtgttcgagaagatgatgccgggctacatgtccgtgctggaatcgaatctcaccgcgcgcgaccagaaaggtatcgtcgatgaaggccataaaattaagggcgcggcggggtcgataggcttgcgccatattcagcagttggggcagcagatccaaacgccagatttacccgcctgggaagacaacgtcggtgagtgggtggaagagatgaaatccgagtggcaaaacgatgttgcggtactgaaggcctggattgcggcggcggataaaaaatgaccccggataaaccggggtgcgcgaatactgcgccaacaccagggaactggttgttgagccaggattgttcgagtgatttttttacacggcgcaacctgaggatttggcttgctcgctcattaagatagcaaaccataaataatttgttacgtgaatcggtaaaatatgtgaagcatagcgagtaaatcaaaattatttacttgtttcatagagttgcgctaaggggttagcatgatgaagaagattggcgtggtactaagcggctgtggcgtttacgacggcgcagaaatccatgaagcggtcattaccctgttggccattgcgcgccgcggcgcgcaggcggtttgctttgcgccggataaggcgcaaaccgacgtgatcaaccatctgaccggcgaaacgatggcggaaagccgcaacgtgctgattgaagcggcgcgcctggcgcgcggcgctattcagcctttgaccagcgcccgcgcggacgagctggatgcgctgattgtgccaggcggctttggcgcggcgaaaaacctaagtaattttgccgcccaggggagtgactgcgcggttgaccgcgatctgcaggcgttaacgctggcgatgcacgaagcgggtaagccgctgggctttatgtgtatcgcgccggcgctgttgccgaagattttcccgacgccgctgcggataaccattggtaccgatccggatactgccgaggtgctggaagagatgggcgcggagcatgtgccgtgcccggttgacgacatcgtggtcgatgaagacaacaaagtggtgaccacgcctgcttatatgctggcgcagaatattgccgaggccgccagcggtattgagaaactggtcgatcgcgtactggttctcgctgaatgagtaagcgtgttgcgccgctggcgatgattaagcgcctgctgttacgcctgctgctggtctgtgtggtgttctggggcggcggtatcgccgtattcagcgtcctgccggtgccgttctcagcggtgatgctggagcgccaggttagcgcctggttctccggtgatttccattatgtcgcccattctgactgggttggcatggacgagatttccccctggatggggctggcggtgattgccgccgaagatcagaaattccccgaccactggggttttgacgtaccggctatagaaaaagcgctggcgcataacgagcgtaatgaaaatcgtattcgcggcgcgtcgacgctgtcgcagcagacggcaaaaaacctgtttttatgggatggccgtagctggttgcgcaaggggctggaagtgggcttgaccgtcggcattgaaacggtctggagcaagaagcgcattcttaccgtgtacttgaatattgccgagtttggcgacggtatttttggtgtggaagcggcggcccagcgctattttcataagccggccagccgtttaacccctgcagaggccgcgctgctggcggcggtattaccgaatccgattcgttttcgcgccgatgcgccatcaggctatgttcgcagccgacaggcgtggatcctgcgccagatgcgtcagttaggcggcgaaggctttatgcaggccaataagctgcattaaccgcgatcccgccgggagatgattagtcttcatcaaacccggcgttgaacagcgcaatcaccgccgccagcgcttcgacttcctgcgggccgctggcttcaacctcaatttggcgtcctttggcggaatccagcatcagcagggcgataacgctgttggcttccgcttcggtgccttcgtcgttgcgtagcaacacttccgcatcgaaattctgcatcagctcgaaaagcttcattgccgggcgcgcgtgcatgcccagcttgttggtgatttcaacggtttgcttgacggtcatgatttacgtttttccagcgtccggtgacgagattgcacgttcttaccgcgcgagcggaagtagtcagcaagctgttcggcaatatagaccgagcgatgcttaccgccggtacaaccaatggccaccgtcagatagctgcggttattggtttccagcattggcaaccatagctcgagatagctacgcgtctgataaataaagttatgcacttccgtatggcgatcgaggaaggcggcaaccggtttatcgaggccggtcatggggcgcagcttcggatcccagtgcgggtttggcaggaagcggacgtcaaagacgtaatcggcatcgatagggataccgtgtttgaagccgaatgattcaaacaccatcgtcaattcacgctcgcgtttacctaacaggcgggtacgcagcatctcggccagttcatgcaccgacatttcggaagtatcgacgatcagatccgcacgggagcgcagcggctcaagcagatcgctctcttcgtcgatcgcgctttcaagcgacagattcttgctggagagcggatgtaagcgacgggtatcgctgtagcggcggatcagggtgttgcggtcggcatcaaggaacagcagctgcggggagaaggattccggcagattctgcatcgcttgttcaaagatttccggtgattccggcatattgcgcacgtcaatgctgacggccgcggagatatcgcggtcggccagcgttcgcgccagctcaggcaacagcactaccggcaggttatccacacagtagaagcccatatcttccagcgctcgcagggcgacggatttccccgagccagagcggccgctgacgatcatcagtaccatgtaccgtttctcctcagtacgataaaggttaagacgcgactcacgttaagcgtcatcgctgcttcctgcttcggtgatgatctcatacaactcttcatcgctcaccgcagcgcgcaggcgacggcagatggttttgtccgccagacgtttggcgaccagcgagagcgtatgcagatgggttttggtttgatcggccggtaccagtagcgcaaacagcagatcgaccggctgattgtcgatcgcatcgaaggcgatcggcgtttccaactgcacaaatacgccaacggcgcgcagggtatcctcttcaagcttgccgtgagggatcgcaatgccgttgccgatcccggtactgcccattttctcacgggtcaggatcgcttcaaaaaccacctgcggcggtaaacctagctgcttcgccgccagttcgctgatgatttccagcgcgcgtttcttgctctggcagtgaacctggctacgggtacaatcctggttaaggacattgctcagttgtagagcggaatcgttgttcatcataatttcacctgagctgcccttatccgcgggctgcggataagggcgatcgcccggacaattagtgttgtttcagtttatctttatgttttgttaactgtcttgccagcttatcgataagaccatcgatagcggcatacatatcctgcccttccgcactggcatggatttcgccaccgttgacatgcaaattggcgtccgcgatttgcgtcaccttctctacttttaacacaatatagacctggttgatcctatcgaaaaactgctccagtttgctgaacttcgcggtaacgaagtcgcgcatagcaggagtaatctcgacgttgtgtcctgtaatgttgagctgcatagtgtcttccttatcggttgtgtcagaccagttgtttgcgctggtttgacggcggaatggataaagactctcggtacttagcaacagtgcgccgcgccaccataataccctgatcggagagcatggtggtgagcttgctgtcgctcaacggcttcgcggggttctccgcggcgattaacttcttcaccagcgcacgaatggcggtagacgaggcttcgccgccgccttcggtattgacgtggctggagaagaaatacttcaactcaaaaataccgcgtggactgtgcagatatttttgcgtggtaacgcgtgaaatggttgattcatgcatctcgacggcctgagcgatatccgccagcaccatcggtttcataaattcttcaccctgctcaaagaaggcctgctgctgttcgacgatgcagcggctgacccgcagcagggtatcgttacggctctcaaggctcttaatcagccagcgggcttcctgcaggttgctgcggataaactggctgtcggcgtcgttgcgcgcattattgcccatcgccgcgtattgctgattaatcttcagccgcggaatgctgtcggaattgagctcgacgacccagcggccgctgaccttgcgcaccagcacatccgggatcacgtattccggctcgctggtttggatggactgacccgggcgcggatccagcgactggatcagacaaaccgcctctttcagaacgtcttctttcaagcgggtgacgcgcatcaggctgcggaaatcatggttggccaggagatcaagatgctcgctgatgatcaaccgggcttcttccagccatggcgtctctttggcaaattgtgaaagctggatcagcagacagtcacggagatccctggcggcgacgcctaccggatcgaagcgctgtacgcgcttgagtaccgcttcaacttcctcaagaccaatttcatcatcttcgatactgtcgacaatgtcctgaatgggaatagtgaggtagccggtatcgtcaacggcatcgacgatggaggtggcaatcgcgcggtcggtatcggtgaatggcgtgagctcgacctgccacatcagataatcctgcaggctttgggtggtctcaccctgatagatcggcagttcatcgtcctggtagtcgacgccattacccgacggcgtgccggcggtatagatttcatcccagctggcgtccagcgggagctcgtccggcatctctttttgttcgagcgcgtcgacggtatccagagactcgcggtcctcggcttctgtggtttcaacctcttcgtgaagatcggtttgctcaagcaacgggttactctccagcgcctgctggagttcttgctggagttctaacgtggacagctgcaacaagcggatggcctgctgcagttggggcgtcatggcaagctgttggcttagccttaattgcaaaccttgcttcatgttcagggtcaatatctccggctaaaacgtctataacctctaccctatcagagtctgaagtcttccccaaggtacacgcgtttaacctgctcgtcttcaaggatttgctgcggggtgccgtgggcgatgagatggccctggctcacgatataagctcgttcacagaccgccagcgtctccctgacgttatggtcagtaatgagtacgcccagcccgctgtcgcgcaggtgttcgatgatgcgtttaatatcgataacagagatagggtcaaccccggcgaacggttcatccagcaggatgaatttcgggttcgccgccagcgcgcgggcgatttcgacgcggcggcgttcaccgccggagagcgcttggcccaggctatcgcgcaggtgttcaatgtggaactcttccatcagctctttagcgcgatcttcacgctgctcgctgctgagatcgtcgcggatctgtagcaccgccatcagattatcgtagacgctcaggcggcggaaaatagaggcttcctgcggcaggtaaccgatgccgcggcgcgcgcgggcatgtagcggcagcaggctgatatcttcatcgtcaatgatgatgttgccggcgtcgcgcggcacgatgcctaccaccatataaaaggtggtggtcttaccggcgccgttcgggcccagcaggccgacgatttcaccggagttgacggtcaggctgacgtcttccaccacgcggcggcctttgtaggctttggcgagattttttgcagttaatgttgccataacggattacttacctttcttctgctgatcgccgcttttgtcctgcaactgcgaaggtaccagcaccgtagtcacgcgaccgcctttgttgctgaaagcctgcattttctgctctttcaccagataggtgattttgtcgccctgaatattgctatccagctgttccagatgtgcgttgccggtcagcaccacaaaatcgttctgcagttcataatgcattttcgacgcgcggcctttcaccggcttgccgttgtcctgcatctgatagaaggtggccggattgccgaaaccgtcgatcacctctttgcctttttcaccgccagggcgggtaaccacgactttgtcggcattgattttaatggtcccctgggtgacgaccacgttgccggtgaaggtcacgacgttgccctgcatatccaacgactgctgatcggactcgatgtgaatcggctgatcggtatcgccggtttttgccagagccggcaggctggcggccagaagcgcgcttgcgagcgcaatgttaaggctgagtttgtttgttctgaatttcataagaggttctaaccttttcaatcagctcggcatttttgctgcgtaggtttccgcgcattttcaggccgctggaattaaatgttgttccgtacaacgtcaccatatcgtcagaggttacatcctgggtcaccaggtttacctgcgcgttatcggtggtaattttgcgcagttgagagtcggggcttaacgcgtcgacctcaacatggccgtaaagatacagcatacggtcgttggttaacttggctttatccgctctgattgaccaggtcggaaccttattcgtatcaaaggtggtcatcaccgggttggtgaaccacgatacttcttgttcggaaaagtattcgacatgctcggctatcagacgatagctcagcgcgccttccgggctatacaccacggtatcggtatgctcgcttttatacgtcggatcgttaggattgaccgcgacggtcgcggtgtcgtccgtactcgccaggttcaggccgatcaggatcaacgcgaccagcgatagtaagatgataacccaacgtctggttttactcatattgattgccctttggcctcatcaagcttgccctgcgccaatagtaacaaatcgcagacttcgcgtaccgcgccgcgtccgccgttaattcgcgtgacgtaattcgcccgtgggagcagcagcggatgcgcatcggcgacggcgacgcttaaaccgacttccgccattactggccagtcgatcagatcgtcgccaatataagcgacttcatccgggcgaaccgccagtttgcttaataattcacgaaacgccaacagcttatcggactgaccttgatacagatgcgtaatgcccagcgtctggcaacggtcttctaccagtttagcttttcgcccggtaataatcgcgacttcaataccggaagtcagcgcgcagcggatcccgtagccatcgcggacgttaaacgctttcagctcttcgccgttgttgcccatatagataagaccgtcggaaagcacgccgtcgacgtcgaggatcagtaaacggatcttcgccgcccggtcgataaattcctggcttacctgcccgtagcaggtgtcgacctgggcatcagcattattcattattttatccttacttacactacgccagcgcgcagcagatcgtgcatatgtaccacacctagcagccggtcgccatcggcaaccagcacgcaggtgatatggcgggactgcatcaggttgagcgcatctaccgccagcatgcccgggcgaatgcggatcccgcctggggtcatgacttcagcgatgctggcgttgcgcatatcgacgccggtatcgaagacgcggcgcaggtcaccatcagtgaagatgccgatgatattcatctcctcatcgcagatggccgtcatgcccagattttttcgggtgatttccagcagcgcgtcacgcagggtggcctgcaggccgacgtgggggatctcgtcgccagtatgcataatatcattgacccgcagcagcagcttacgaccgagtgcgccgccggggtgcgacaaggcgaaatcttcggcggtaaagccgcgtgcttcgagcagcgcgacggcgagggcgtcacccatcaccagcgcggcggtggtgctggaggtcggcgccagacctagtggacaggcctctttcggcactttcacacacagatgaatatcggcggcgcgcgccatgctgctatccggacggctggtgacgcagataagcggcacctgctggcgtttaagcaccggaatcaacgccaggatttcattagattcaccggaattagataacgcgatgaccacatcctgcggcgtcaccatccccaaatcgccgtgagcggcttcaccgggatggacaaaaaaagccgaggtgccggtactggcgaaggtcgccgccattttgcgcccgatatggccggatttgcccatacccatcactacgaccttaccgccgcagcggaaaatcgtctcacaggcgcgggtgaaatcttcattaatatactgatcgagctgggccagaccttcacgttcaatttccagaacctgacgtcctgcctgttgaaagtcaaaatccgttggcaaatctatttgcgacatgatgttaccccaattcattcaacgaagtacggcgctgaacagaacagcaccgccaaccaaaccagaaagccgccgaccagcaaggcgcccgctacgcgccccggctgccgtttacgccgccagcacagcagcgcgaaaatcgcgcttaccagcagcatcacgctgtagtcgcgcgtaaaagcttcagcagggaaggcaccaggggcgattaacgccggcagcccgagcaccagcacgaggttaaggatattggcgccaatgatatttccgatggcgatatcgtcttccccttttcgtgcgccggcgatggcggtggccagttctggcaggctggtgccgatagcaataaccgttaagcccaccgtcagttcgctaatggcgaaatagttcgccaataccgtggcgttatccaccaccatgcgggtggccatcggcatgacgatcatcgccaccccaagccacagtagggcgacgggcaacgaaccgccgcgcggcagctccgccagctgttcccgggtcaggctatcgctgccctggcgttccgccaggcgcgctatttttagggtaaacaccagccacagtatggccagcgccagtaaaaacagcccgtccagacgcgacagttggccatcgtagagcacaaatcccgccagtaaactgaccagcaacattagcggcaattcgcggcgcaggatatcagaatgcacggtaaatggatggagcagggcggcaagaccgagaattaatagaatattcgtaatattggatcccaacgccgtcccgatcgccagatcggtttgcccgtgaagtgaggcggcggtggaaacgatgatctccggtaggctggtaccgatgctcacgaccgtcatgccgatgatgagcggcgggatccccaacatgcgacacagtattgaagcggcgtataccagacgatcggcgctgtaaaccactagcagtaaaccaattattaacagagccgttgctaagagcatctaaagtcctttcttcaggtataatcgtcgcctcgctggccgtccgtacgcagcgtaacgaattcttaattttgactttatgtgtggcaaaagtaaaacaaatgccagctttcgctaacccgggcaggtaagattctgtaaaaatgttgggtttgtggtgaaagaaagcgccatgcttagcccgaaggtttagtaaggatgattttatgagccaaactctggcgaatttagtcgaggttcgcggtattcgtttctctcggggcgaccgcgtcatcttcgatgatatctcgctatcggtgcctcgcggcaagattaccgccattatggggccatcggggatcggcaagacgaccctgctgcgtttgattggcggccagatcccgccggacagcggcgagatcctgtttgacggcgaaaacgtgccgcaaatgacgcgctcgcggctgtataccgtgcgtaaacgcatgagcatgctgtttcagtccggcgcgctattcaccgatatgaacgtgtttgataacgtagcttacccgctgcgcgaacatactcagttgccggatgcgctactgcacaccaccgtcatgatgaagctggaggcggttgggctacgcggcgcggcgaaactgatgccttcggaactctccggcgggatggcgcggcgcgcggcgctggcaagggcgattgcccttgagccggatctgatcatgtttgatgaacctttcgtcggacaggatcccatcaccatgggcgtattggttaaacttatctcagagctgaatagtaccctgggagtgacctgcattgtggtatcgcacgacgtaccggaagtgctgagcattgcggattacgcctatatcgtggcggataagaaaatcgttgcccacggcagtgcgcaatcgctgcgtgaaaatagcgatccgcgcgtgcgccagttcattgatggcatcgctgacggcccggtgccgttccgctatcctgcgggcgattaccaccatgatttattaggcaaagggagctaaacgactcatgctattcaatgcgttggcagcgctcggacaccgcggcatcaaaaccaccgcgaccttcgggcgcgccggattaatgctgtttaatgccgtggtgggcaagccggaatttcgcaaacatgctccgctgctggtacgccagctgtataacgtcggcgtgctatcgatgctgattattatcgtctcggggctgttcatcggtatggtactggggctgcagggctatctggtattaacgacctatagcgcagagaccagtctgggtatgctggtggcgttgtcgctgctgcgcgagctggggccggtggtggccgcgctgctgttcgccgggcgagccggttcggcgttaaccgccgagattggcctgatgcgggcgaccgagcagctctccagcatggaaatgatggcggtggatccgctgcgccgggttatttcgccgcgcttctgggccggggttatctcgcttccgctgttgacgatcattttcgtcgccgtgggcgtctggggtggttcgctggttggcgttagctggaaaggcatcgacgcagggttcttctggaccgcgatgcaaaacgccgtcgactggcgaatggatctggttaactgcctgattaaaagtctggtttttgccgtaacggtaacctggattgcgttattcaatggttatgacgctatccccacttccgctggaattagccgggcaacgacgcgcaccgtggtgcattcgtcgctggcggttctggggctggattttgtgctgactgcgctgatgtttgggaattaagttcatgcaaacgaaaaaaaatgagatctgggtaggtgtgttcttactggcggcgctgctggcggcgctgtttgtctgtctgaaggcggcgaacgtgacctcgttgcgtaccgaaccgacctatcgtctttatgcgaccttcgataacatcggcggcctgaaagcgcgttcaccggtgcgcatcggcggtgtggtggtcggtcgcgtcgcggatatcaccctcgatccaaaaacctatctgccgcgcgttgccattgatatcgatgaaagctacaaccacattccggataccagctcgctggcgattcgtacttctggtttgctcggggaacagtacctggcgctgaacgtcggttttgaagacccggaactgggcaccgctattcttaaagacggcggtacgattcaggacaccaaatccgctatggtattagaagatctgataggccagttcctctataacagcaagggcggcgataatcagaattctgacaatgataaggcggcggctgagggtcatactgacgctacgccgcaggccggcatgacgcattaatttcaggagagacaagatatgtttaaacgcttactcatggtcgccatgctggtgattgctccactgaccgccgcgcatgccgcggatcaaactaacccgtataagttgatggacgaagcggcgcagaagaccttcgatcgtctgaagaacgaacagccgaagatcaaagctaacccgaactatctgcgggatattgtcgatcaggaactgctgccttacgtgcaggtgaaatatgccggcgcgctggtgctgggccgttactacaaagaggcgacgcctgcacagcgtgaagcctatttcgccgccttccgcgagtatctgaaacaggcttacggtcaggcgctggcgatgtatcacggccagacttaccaaattgcgcctgagcagccgctgggcagcgcaaccatcgtgccgattcgcgtcactatcctcgacccgaatggccgtcctccggtacgtcttgacttccaatggcgtaaaaatacccagaccggcaactggcaggcttatgacatgatcgccgaaggcgtcagcatgatcaccaccaaacaaaacgagtggagcgacctgctgcgtacgaaaggcgttgatggtctgaccgcgcaactgaaagctatttctgcccagcctatcactctggaccagaaaaaataatgagcgaacaactgagctggaaccgcgacggtgaacgcctggcgttgcgcggcgaactggatcaggaatttatactgccgctgtggaatgcgcgcgcgcaggcgaccgacggcgtatccactatcgacctcagcgacgtttcacgggtcgatagcgccggggtggcgttgctggttcattttgtcgcgctggtacgtcggcagggcaaaacggcgcaagtggtagggaaaagcgaaaacctgcaaacgctggttagtctttacaaccttccggcggacatgatcccgtaaatttttcagtaggttaatgctgaagctattctgaaagccccatcaatctgttcgatggggctttttgcttgtttaagacagcgccactttcctctaagatgttgggctgttttcacactcagaaaaatgtgatcccatggaaaatcatgaaattcagaccgtgctgatgaacgcactctcccttcaggaagtccacgtctctggcgatggcagccactttcaggttatcgctgtgggtgagatgttcgacggcatgagccgggtaaaaaaacagcaggctatctacgcaccgctgatggaatatattgccgacaatcgcattcatgcgctgtcgatcaaagcgtttaccccgcaagaatgggcacgcgatcgcaaacttaatggcttttaagctgtagggatgttccctacagcgttgatgaatttttaaccgagaacagaatcaatggataaattccgtgttcaggggccgactcgcctgcagggcgaggtcaccatttccggcgctaaaaacgctgccctgccaatcctctttgccgcgctgttagccgaagagccgattgaaatccagaacgtaccaaagctgaaagatatcgataccaccatgaagctgctgagccagctgggcgcgaaggtcgagcgcaatggttccgtatggatcgatgccggcccggtaaatgttttctgtgctccgtacgatttagtgaaaaccatgcgcgcttccatctgggcgctgggaccgctggtggcgcgtttcggccagggccaggtttctctgccgggggctgcgccatcggcgcgcgtccggttgacctgcacattaccggcctggaacagctgggcgcggaaatcaaactggaagaaggctatgtgaaggcgtcggttaatgggcgtctgaaaggcgcgcatattgtaatggacaaggtcagcgtaggcgcgaccgtaactatcatgagcgcggcgacgctggctgaaggcacgaccgtgattgaaaacgccgcgcgcgagccggaaatcgtcgataccgccaacttccttaacgcgctgggcgcgaagattacgggtcagggttccgaccgtatcaccattgagggcgttgcgcgtctgggcggcggcgtttatcgcgtgctgccggaccgtatcgaaaccggtaccttcctggtcgctgcggcgatttccggcggtaaaattatgtgccgccatgcgcagcctgataccctggatgcggtactggctaagctgcgtgaggctggtgcggatattgaagtcggtgaagactggattagtctcgatatgcacggcaaccgtccgaaagcggtcaacgtgcgtaccgcgccgcacccgggtttcccaaccgacatgcaggcgcagttcaccttgctcaacctggtggctgaaggaacgggcgttatcactgaaaccatcttcgagaaccgcttcatgcacattccggaactgatccgtatgggcgcgcacgcggaaatcgaaagcaataccgcgatttgccatggtgtcgcgaagctgtccggcgcacaggtcatggcgaccgacctgcgtgcatctgcaagcctggtgctggcgggttgtattgcggaagggacgaccatcgtcgaccgtatctatcatatcgatcgcggctatgagcgcatcgaagataaactgcaggctctgggcgcgaatatcgaacgcgtcaaaggcgagtaattctgctgcggtagcagccctctgacgtccgtccggggctgttatcgatctctccctcacgttaggtcttatttctcttctggcgcatcatctgcgttctgtcgatgaactgatgggtaatggggtcgtggtaacgcgatggccagataacccacggatcggttcccagcgcgtttgcaataatcaattcgcctttaggccacggacgggttagcgcgttggcaagcgtagaagagcttaatccgtgacgtcgcgactcagctgcgagggacgtcccctttttgcgaaggccggcaataatatccgctgaatgccagtcgatgaacttatccataaattctcccggtgataactgtctgcacgtcaatacggacggccgaagtactataccctggttcttatatggttttaacaagttcctgtattgttcttgtatattcagaatatattaaggtttctggcgttacttgaagaatattggattttattggaactctcccgcgcggtgagcacgggagagagaaggggattagtggtcgcgctgaacggcgatatgcgcaaggccgatgagggcatcgcgccatggcgtatccggcagaacctgcagtgcggcgatagctttatcggcttcctcttccgcacgtttctgcgtccactccagcgaaccgcaggccgccatggtttcaagtacggcgtcaagcagatgacgcccgttaccctgctcgatagcgccgcgaatcatcgccgcctgatccggggtaccatgatgcatagcgtgtagcagaggtagcgttggtttgccttcgttcaggtcatcaccgacgtttttgccaagacgttcaccatcagaactgtaatccagcagatcgtcaatcaactgaaacgcggtgccgaggtaacggccataatcctgcagcgcctgttcttcttcggcgctgcaaccagccaggatgccggaacactgcgaagcggcttcaaacagacgggcggtcttactgtagatgacccgcatatagttttcttccgtgatatccgggtcgttgacgttcatcaactgcaggacttcgccttcggcaatgacgtttacggcttccgacatcacctccagcaccttcagcgaaccgagacgagtcatcatctggaaggcgcgggtgtagataaagtcgcccaccagtacgctggcggcgttaccaaacgcggcattggccgtcgccttgccgcggcgcatatcggactcgtcgacgacgtcgtcatgcagtagggtcgcggtatgaataaattcgatcagtgcggcaatgttgacgtgcgcattcccctgatagccgaccgcgcgagctgcaagcacggcgatcatcggacgaatacgttttccgcctccgctgacgatgtagtagcctaactgattgataagctgaacatctgagttgagctgctcaaggattgccgcattgacacccgccatatcctgcgcggttaactcattgattttttctaaattcatcgcaaaagccgggccaaatgtcctgttaccgcgaatccaggtgggatcacagaaggattaagatagaattaaaagaagatatgattgtactgaaaaatcagcgcagataaacgttagcgtgaaagttgtgttttttttctgcgttgatcgatgatcgctcttgtcaaagggtcgcgttttgcgtaatattcgcgccctattgtgaatatttatagcgcactctgaatcacacgaagaggtgcgcggaagcggagttttatatgtacgcggttttccaaagtggtggtaaacaacaccgagtaagcgaaggtcagaccgttcgcctggaaaagctggacatcgcaactggcgaagctgttgagttcgctgaagttctgatgatcgcaaacggtgaagaaatcaagatcggcgttcctttcgttgagggcggcgtaatcaaagctgaagttgttgctcacggtcgtggcgagaaagttaaaatcgttaagtttcgtcgtcgtaaacactatcgtaagcaagcaggccaccgtcagtggttcactgatgtgaaaatcactggcatcagcgcctaagacttgagggagtagatttaaatggcacataaaaaggctggcggctcgactcgtaacggtcgcgattcagaagctaaacgtctgggcgtaaaacgtttcggcggtgaagcagttctggcaggtagcatcatcgttcgtcaacgtggcactaaattccacgctggcaccaacgttggttgcggccgtgaccacactctgttcgctttgactgacggtaaagtcaagttcgaagttaaaggcccgaaaaaccgtaaattcatcagcatcgttgctgaataagtttttcgcgtcctggtgacggatgaaagccccgcaacacgttgcggggctttttacattagaatcccggaaaaaatttctgcagggaaaacgggcatcatgaagcagcaggccggcattggcattcttttggcgctaaccaccgcgatgtgttggggagcactgccaattgcaatgaagcaggttctcgaagtgatggagccgccaacggtggtcttttatcgctttttgatggccagtattggtcttggcgcgatcctcgccatcaaaggcaagctgccgccgctgcgaatttttcgcaagccgcgctggttggttttattagcgattgctaccggcggtctgttcggtaacttcattctgttcagctcttccctgcaatatctcagtccaacggcctcccaggtcatcggccagctatcgccggtcggtatgatggtggcaagcgttgtgattctgaaagagcgcatgcgcggtacccaggttgtgggggcgctgatgttgctcagcgggttggtgatgtttttcaacaccagcctgattgaaatctttacccgtctcacggactacacgtgggggtaatttttggtgtcgcagcggcaacggtgtgggtaagctacggggtcgcgcaaaaggtgttattgcggcgcctggcatcacagcagatattatttttgctgtacactttatgtacgattgcattactgccactcgctaaaccgggggttatctccctgctgagcgactggcaactggcttgcctgattttttgcgggctgaataccctggtcggctacggggcgctggcggaagccatggcgcgctggcaggcggcgcaggtcagcgcgttaattaccttaacgccactgtttacgctactgttttctgatttattatcaatggcctggcccgatgttttcgccagaccgatgttaaacctgattggttatctcggtgcgtttgtcgtggttgcgggcgcgatgtattccgccattggccatcgtctttggggacgctggcgcaagcgagaagcggttgtaccgctgccccgctcaggcgaatgatttacggagagtaaaatgaagtttgtagatgaagcaacgatcctggtcgtagcaggtgacggcggcaatggttgcgttagcttccgccgcgaaaaatatattccgcgaggcggcccggacggcggtgatggcggtgatggcggcgacgtttggctggaagcggacgagaacctcaacaccctgatcgactatcgattcgaaaaatctttccgcgcagaacgtgggcagaacggtcagagccgcgactgcaccggtaaacgcggtaaagatgtcacggtgaaagtgcctgtagggacccgcgtcatcgaccagggaaccggcgagaccatgggcgatatgaccaagcacggtcagcgtttaatggtcgcgaaaggcggctggcacggtctgggcaacacgcgcttcaaatcatccgttaaccgtaccccgcgtcagaaaaccatgggtacgccgggcgataagcgcgatctgcagctcgaactgatgctgctggccgacgtggggatgttggggatgccgaatgccggtaaatccaccttcattcgcgcggtctccgcggcgaagccgaaagtggccgactatccatttaccaccctggtgccgagcctgggcgtggtgcgtatggacaacgagaagagctttgtggtcgccgatatcccggggctgattgaaggcgcggcggaaggcgctggccttggtattcgcttccttaagcacctcgagcgctgccgcgtgctgctgcaccttatcgacatcgagcctatcgacggttccgatccggttgagaatgcgcgcattatcatcggcgaactggagaaatacagcgagaagctggcctctaaaccgcgctggctggtcttcaacaagattgacctgatggacaaagcggaggctgaagccaaagcgaaggccatcgccgaagcgctgggttgggaagataagttctacctgatctccgcggccagccagcagggcgttaaagacctgtgctgggacgtgatgacctttatcatcgaaaatccaatcgtgcaggcggaagaagagcagaagccggagaaagtcgagttcatgtgggacgactatcaccgtcagcagcttgaagaagccgaactggaagaagatgacgaagactgggatgacgactgggacgaagacgacgaagaaggcgtcgaattcatctacaaacgttaatcctgagtaaaaagggccgcatcatccaatgcggcccttttgttttagttgttctggtacaaatctttatacagtcgactttcgaagcgcaccaatggtatgcggcggttgcgctggtcgcccggcggtaccgcatagccggagaggtactgcacgaaggccattttttgcccgctggcggtagtaatgaaacctgccaggttataaaccccttgcagcgaaccggtcttcgccgaaaccttaccgtcgacgcccgcctgatgaagtccggcacgatactgcagcgaaccatcgtgcccggcaagcggcaacatcgagataaagttgagttcattgtcgtgctgagcgatgtactgcaatacctgcatcatcgttgccggcgcgatcaggttgtgccgggacaggcctgagccatcggcgataatcgtgttaccgaggtcaatacccgcctgctggcgcaggatttgccgtaccgcgtcggagccggcgcgccaggttcccggtacgcccattcgcgcgtggccgatagtacggaacaccgtatcagcaatcatgttgtcggatttcttcaacatgatgcgcagaagatcgtgcaacggcgccgattgagtcgtcgccagcacggtacccggatcgttggccagcgtctggcgcagaagagttccgctgtaggcgatccccgcatcggcgagctcggctttcaggatcgcgcctgcatagcctgcgccatcctgaatggcgaacgccagcggcagcggctcgctgcgctgcggcaggcagccggtgagggtatagcggttgagatcgcccggcacaacgtccagctcgcagtactgcgcttctgcggagccgcgcgccagcgtccgcacctggctgaacatggtgaccggatagtaagacgccacgcggatgaaggccaaatcgcccgctttctgtgcgctatagagcgagacggagaaacagttacgatcaacgatcgccgctgctggcggggcgctgaagcactgcgtcatgtcattccatggccagccgggggccttatcgtggctggcgaaaaccgaggtatcgataagcacattgccttcaatgcgctgcacgccggcttttttcagcgacgccaccatgttgcggatatcctgacgctttagcgtcggatcgccgccgaaacgggcaatcaggtcgcctttcagcacaccgccgtcaagggtgcctttggtttccagcgtcgtggtgaagcggaagtccggccccagttgtagcaaagcggccagcgcggtgatcaccttctgggtactggcaggcaacgccatctgctggctatgaaagtctatctccggcgtcggggagccaaccttctgcgccataaaggcaaggttcgcgccggcaggaagctggctgatgtactcgtcaatattcgcggcctgagcgctaagcgctataccggcagtcaatccgatgataaatctgggaaatcgcataatctcgcgctaacaacctgaaaccaagccgtcatactacggtgcatcaccctgtaaagtaaacgatgacccatagtgaacttcagggtaaaatacatatcaaattgaaaattgctgctgacctggggagtgtttcccgggtcggttttctttttgcttcggccatggctaagacgtgaccgatggcggaacgactccgtccgttccatgaaggaatgataaagaggtataacaaatgcaagctattccgatgaccttacgtggcgcagaaaaactgcgcgaagaactggatttcctgaagtccgtacgtcgtccagaaattattgctgctatcgctgaagcgcgtgagcacggcgatctgaaagagaacgcggaataccacgcggcccgcgaacagcagggcttctgcgaaggtcgtatcaaggatatcgaagcaaaactgtcgaacgcgcaggttatcgatatcactaagatgccgaataatggccgcgtgatttttggcgccaccgtcagcgtgctgaacctggataacgacgaagagcagacttaccgcatcgtgggcgatgatgaagctgattttaaacagaatctcatctctgtgaattcaccgatcgcccgcggcctgatcggcaaagagcaggatgacgtcgtcaccatccgtactccaggtggtgaagtggaatacgaaattatcaaggttgaatacctgtaaggcgtatttcccgctacgatgtttatagattgtaaagaaaggaaaaaggccgcatagcggccttttatcaacgtcaggagcatggcattttgctcgcctggccacagaaatccctcgttttacacaatgttgtgtcgagattcaggatattcttagcgtggcagcgagattttacgctctggcgttgggcggtacagaaccagcgttttaccgatgacctgtacgttacaggcgccggtttcacgcacgatggcttccacgatcaaggctttagtttcgcgatcttctgaggcgatcttcaccttgatgagctcatggtgccctaacgcttgttcgatctcggccagtaccccttcggtcaaaccattattgccaagcataactaccggcttgagcggatgtgccagacctttcaggtgctgtttttgtttagtactcagattcatcgtatttttttgcttacgttgggattgaaaacgggtcattctaccgccatctcccatatatcgccaaactaccgcgtcgatttttacgcagtaaagtacgatgaacccgaatgggaatgttaaatgacaggtaaaaagcgttctgccagctcaagccgctggcttcaggaacactttagcgataaatatgttcaacaggcacagaaaaaggggttacgttcccgtgcctggtttaaacttgatgaaatacagcaaagtgacaagatttttaagccgggaatgacgatagtcgatctcggcgctgctcccggtggctggtcgcaatacgcggttacgcagatcggaaacagcggccgcatcatcgcttgcgatcttttaccaatggatccaatcgtcggtgtggacttccttcagggcgattttcgtgatgaattagtcctgaaagcgttacttgagcgagtaggcgacagtaaagtacaagttgtcatgtccgatatggcgccgaatatgtgcggaacaccggcggtggatattccccgggccatgtatctggtagaactggcgcttgaaatgtctcgtgatgtattagcgccaggtggtagttttgtagtgaaggtgttccagggcgaaggcttcgatgagtatcttagagaaattcgctccctgtttacgaaggtcaaagttcgtaagccggactcttcccgcgctcgttcgcgtgaagtgtatattgtagcgaccgggcgtaaaccataaccggtagatttcaaacgaaagtttgaaagacgctggatatagagtatcctgacgctgtttttaacacagttgtaataagaggttaatcccttgagtgacatggcgaaaaacctaatactctggctggtcattgccgttgtgctgatgtcagtattccagagctttgggcccagcgagtcgaatggccgcaaggtggattattctaccttcctgcaagaggtcaatcaggaccaggttcgcgaagcgcgtatcaacggacgtgagatcaacgttaccaagaaagatagtaaccgttacacgacttacattccggttaacgatccgaagctgctcgacaacctgttgactaaaaacgtcaaagttgttggcgaaccgccggaagaaccgagcctgctggcttccatcttcatttcctggttcccgatgctgctactgatcggcgtctggatattctttatgcgtcagatgcagggcggcggcggaaagggcgcgatgtccttcggcaagagcaaggcccgaatgctgaccgaagaccagatcaaaaccacctttgctgacgttgccggttgcgacgaagcgaaagaggaagtgggcgagctggttgaatatctgcgcgaaccgagccgtttccagaagctgggcggtaaaatcccgaaaggcgtcctgatggtcggccctccgggtaccggtaaaacgctgctggcgaaagctatcgccggcgaagcaaaagtgccgttctttactatttccggttctgacttcgtagaaatgttcgtcggtgtcggcgcgtctcgcgttcgtgacatgttcgaacaagctaagaaagcagcgccttgcatcatcttcatcgatgaaatcgacgccgtcggccgccagcgtggcgccggtcttggcggtggtcacgatgagcgtgagcagaccctgaaccagatgctggttgagatggacggctttgaaggtaacgaaggtatcatcgttatcgccgcgactaaccgtccggacgttctggacccggcattgctgcgtcctggccgtttcgaccgtcaggttgtcgttggtctgccggatgttcgtggtcgtgaacagatcctgaaagttcacatgcgtcgcgtaccgctggcgccggatatcgatgcggcaatcattgcccgtggtactcctggcttctccggtgctgacctcgcgaacctggtgaacgaagctgccctgtttgctgcccgtggcaacaaacgcgtcgtctcgatggttgagttcgaaaaagcgaaagacaaaatcatgatgggtgcggaacgtcgctccatggtgatgacggaagcgcagaaagaatcgaccgcgtaccacgaagcgggccacgcgattatcggccgtctggtaccagagcacgatccggtacacaaagtgacgattatcccgcgcggtcgcgcgctgggtgtgaccttcttcctgccggaaggcgatgctatcagcgccagccgtcagaaactggaaagtcagatctccactctgtacggcggtcgtctggcggaagagattatctacggtgctgaacatgtttctaccggcgcgtccaacgatattaaagttgcgactaacctggcgcgtaacatggtcacccagtggggcttctccgacaaactcggcccgctgctgtacgccgaagaagagggcgaagtgttcctcggccgtagcgtcgcgaaagcgaagcatatgtctgatgaaaccgcgcgtattatcgaccaggaagtgaaatcgctgattgagcgtaactacggtcgtgctcgccagctgctgaacgacaacatggatattctgcacgcgatgaaagatgcgctcatgaaatatgagaccatcgatgcgccgcagattgacgacctgatggctcgtcgcgatgttcgtccgcctgcgggttgggaagaacctggttcttctaacaactctggcaacaatggcaccccgacggcgccgcgtccggttgatgagccgcgtacgccgaacccgggcaataccatgtcggaacagctgggcgacaaataagtctccacgctttgctaaagcgctctgactaatagggccgcagcctaattcgctgcggcccttttgtttttatacggccgtctttaccggctggctgtgagattccttttgggaacctaacgatggcgatggcgtgctatcgtccaacgcataaaatgttttcgggatggcggcggctgcaacacgcgcggatgcgtcctctgtctgatagtattcattttttgaatatttaaacgctggtgtttcattatcctgttggggaattgaatgatgtcaccgccagaatctctaagatggtgcgggccgtgcaatgtccgtgctacaactgtacaaaaccaaagcggaaagaaaacatgcaattacacgcccaggggtcaacgctcgatctctcccatccgcatgtgatggggatccttaacgtcacgccggattccttctccgatggcggcagccataactcgctgatcgaagcggttaagcatgccaacctgatgattaacgccggggcgactattattgatatcggcggtgaatcaacccgtcctggcgcggcggatgtcagcgtcgaggaagaactggcgcgggtgatcccggtggttgaggcaattgcacagcgttttgaagtctggatctcggttgatacctcgaaagccgaagttatccgcgagtccgcgcgcgctggcgcgcatatcattaacgatatccgctcattaaccgagcccggcgccctgcaggctgctgcgcaaagcgggctaccggtgtgcctgatgcatatgcaggggcagccgaaaacaatgcaggaagcgccgaagtacgaagatgtttttgccgaggttgaccgtttttttgctgaacacattgtgcgctgcgaacaagcggggatcgcaaaagaaaaattgttgctcgacccggggttcggattcggtaaaaatctttcccataactatgaactgcttgcccgacttggggagttacatcattttggtctcccgctgctggttgggatgtcgcgtaagtcgatggtgggtcagctgttgaacgtagggccgtcagagcggttgagcggcagcttgtcctgcgcagtcattgctgcaatgcagggcgcgcagataattcgcgtccatgatgtcaaagaaacggtagaagcgctgcgcgtggtggaagccaccctggccgctaaggaaaataaacgttatgagtaaccgcaaatattttggcaccgatggtattcgtggccgcgttggcgacgcacctattacgcctgagttcgtgcttaaactgggttgggcggccggcaaagtgctggcgcgccatggttcacgtaaaatcattatcggcaaagacacgcgaatttctggctatatgctggaatccgcgctggaagctggcctggcggctgcgggcttgtccgcctcgtttactggcccgatgccgacgccggcaatcgcttatctgacccgcgccttccgcgctgaagcgggaatcgtcatctctgcctctcataaccctttctacgacaacggtattaaattcttctccatcgaaggcactaagcttccggatgacgtcgaagaagcgattgaagcagagatggaaaaagagctgacctgcgttgattccgctgagcttgggaaagccagtcgtatcgtcgatgccgccggccgctatattgagttttgcaaaggcaccttcccgaatgaactgagcctcggctcactgaaggtggtggtggattgcgcccacggcgcgacttaccacattgcgccgaatgtattccgcgaattaggcgcgcaggttatcgcgatgggctgtgaacctgatgggctgaacattaacgaagaggttggcgcaaccgacgtacgcgcgctgcaggctcgcgtactggcggaaaaagccgatctgggtattgcctatgacggtgatggcgatcgcgtcattatggttgaccatgaaggtaataaagttgatggcgatcagatcctctatattatcgcccgtgaaggtctgcgccagggccaactgcgcggtggcgcagtcggcacgctgatgagcaacatgggtcttgagctggcgctgaagcaacttggcattccatttacccgtgcgaaagtgggtgaccgttacgtgctggaaaaactgcaggaaaaaggctggcgcatcggcgcggaaaactccggccatgtgattctgctggacaaaaccaccacaggtgatggcattgtcgccagcctgcaggtcgtggcggcgatggtgcgcaatcatatgagcctgcacgatctgtgcagcggaatgaaaatgttcccgcagattctggtcaacgtgcgctttaccgaaggcagcggcaatccgctggagcatgaaagcgtgaaagcggtgactgctgaagtagaagctgcgctggggaaccgtggacgcgtgctgctgcgtaaatccggtactgaaccgctgatccgcgtgatggttgaaggtgagcatgaaacgcaggttaaggaatttgcccaccgtattgccgatgcggtcaaaagcgtataactatcgcagctaagtgattaaaaaggcggctgttgctgcctttttaagcatataaaaaggctttttgctgtttttttccgcagttgatacaatacgccaaaattgcccttgcgaaggttattcgctttggttagtattcacacccgcttcagtgggaaatattaaaacgtcccgctttattggtgaagcacttggtatgcggcgaatccgcaaggaacaggttgattatgtacgaagctcttttagtaattttccttattgtagcgattgcccttgttggcctgatcatgctgcagcaaggtaaaggcgctgacatgggagcctccttcggagcaggcgcttccggcacgttgtttggttctagcggttctggtaacttcatgacccgtatgaccggcatcctggccgcgctgttcttcatcatcagtctggcgctgggtaatatcaacagcaacaagaccaataaaggaagcgagtgggataacctgactgcgccgaaatctgagcagactcagccaaccgcaccggctcagccggccagcgatatcccgcactaagtattctgtaccgaggtggtggaattggtagacacgctaccttgaggtggtagtgccctaacgggcttgtgggttcgagtcccatcctcggtaccaatattccagagaaaagacgctgaaaagcgtctttttttgtttttgtcctctctatgcgttgtttatttataaacaacactccgctggttttgacccccgtgaaatcgctaaagtcgccctcatcaattttgacgaggttcagtgacgccatgcgtactttaaaagtagttatcattgccggtatgttgggcctggccggatgcagtagccattcgtcgcctgaaacagtagatacgttgaataccctgcaggtgccggttattaataattccgagcccgcgccggaatcatcaacggtcgttaactattttcaggataacagtcagcttatcagcaagttaagccagtcgcttaaaagcaactacttacaggatgtggataaacgggatgtctttgataaagatagcgaggcgtttcaggtctacggcgcgttaaccaaacttgagcaaatggcttcgatgaacgacgtctaccgtaaagagaacaatattgtgggcttgcaggaaattaataagctgctgaaaagcataccatctgtcgcataaaaaagggattgccgacaggcaatcccgtttgccgcgcttagaaacggaaattgaaacccgcataggcgccatccgccagaacgttatcgcggtggtcatgtttacccgccatatcgatatagcgatagcccgcttcgatgctcatggatttgaggatattcacgcgtaagccggcattagcttcgaggtagtcatctacgccgctggacatggaatccggggaataataagcctcaccgaacaaggtaaagaaatcgcccagcggtagctgagcgccgccgccgagggcaatcgcatagccttcatcgctatcgttcggattcaggtataccgctttaccaccggccgtcagcaggaacgggccgagatcaaagttatagcccatgcccaaacccatcgtatcgccatcgttatcgctatgcgcccagttaccgttaaaggtcattccgggagcctgcgggttaaagctggctgataagttggtgaattctgaaccggcctcaccgtgaaggctaacggaagcgaaggtggcgctgctggcgctcagggcggcgataagcaggatggatttcaatctgaacatgctcattattcgtattccttcgggtaaaaaaatgcccgatacgagcgctcgggcaaaattaacgggtttctggtttaatagttatgtgcagaataaaagcatttatcgcccaccgttaccgtttatatgtttaattttaaacaatagcggggcgataagtggtaggggcgacaggggattaaaacttctcaggcagggaggtgatactctgtaaataaccaccgcgggcaaactcgatatagccaccctttttcaacgctgataacacattcagaatgctgctgcgcgacaagtgagtgcggtcctgaatatattccagcatggatacccgcgaacgggtctcttcaggaagcagtaacatttccattaaatgattacgtatgaccgaataagtccgctgctgtaatactaaatcgtcgcgatataccaaataagaggtgtggtaagccagcagccgggtgacctcttcccacatgttatgctcgctgaagagttggatggctttatcactgtcaatacgcaggatttccgtatcgatttccgcacgaaggccgtggctacggctaggctgaagcatctcggctacgccaaacaggtgtggttcatagacggtgaccatgagtaatctgtccgatgagcgaaaaatggataactcacctttcttaaacagatagagctggattttgcctttatattcccagctaagtcttttccttgcgaccatatttattggcgtggcatgcggttccagcaacgccatcagacgattgatcgcctcttgcggtcgaatgggaggtttaatattcattgcgatcctctcggtataagagtacaggtattcgataaattatagatggtgattattaaaaatagtgatgccataaactataactataaagtaagtttgttatttaggatttattgcggaaataaaaaagccggcgggttagcgccggctggagagtttggctttgcggtttatttatcgcgattttccaggttttcaacctgtggtaggccggtggcggaagacgcgctgagtagcccggattgggcatagccgaatagcttctcacgagtatcggtaatgtccagattgcgcatggtcagctggccgatacgatcttcagcggtaaacatggaatcgcctttttccatggtcagacgttctgctttataggtcaggttgtctgaaacggtattcaggattgagtagtcgttgccgcgacgcagttccagagtcacttcgccggtaatctggctggctacccaacgctgcagtgaatcgcgcagcatcagcgcctgcgaatcgaaccagcgaccctgatagagcaggcgacccaactggcggccatgagcatgatattgctcaatagtatcttcgttgtggataccggtcagcaggcgctcgtaggtgatatgcagcagtgccattcccggagcttcatagatgccgcggcttttcgcttcaatgatgcggttttcaatctgatcgctcatgcccagaccgtggcgaccacctatgcggttagcctccagcatcagttcgacgtcatcgctgaaagttttgccatttagcgcaaccgggtggccctgttcaaaacgcacggtcacttcttcagcggcgatttttacgctttcatcccagaacttcacacccataatcgggttgacgattttcacgctggaattaaggaattcgagatctttcgcttcgtgcgtcgcgcccagcatgttggagtcggtggaataggctttttcgactgacattttgtagtcgaagccgcaggctatcataaactcggacatttcatgacggccgccgagctcatcaatgaagtcgctatccagccacggtttgtagatctgcagttccgcattggtcagcaggccgtagcgataaaaacgctcgatatcgttgcctttataggtgctaccgtcgccccagatgttgacgccatcttctttcattgcggcaaccagcatggtaccggtcacggcgcggcccaggggcgtggtgttgaaataggttaagccgccggtggtgttatgaaatgcgccgcactgaatcgccgcgatgccttccgccaccagttgtttgcggcaatcaatcagacgagcgccttcagcgccatactctttcgcacgacgcggaatggcctcgtagtcgtcttcgtcaggttggcccaggttcgcggtatatgcataaggaaccgcgccttttttacgcatccacagcagggcggcgctggtatccagtccaccagagaaagcaataccaatacgttgaccaaccgggagatgcttaagaatcgtcgtcataaaataaaaccctgctagatagactgtggtgagttcgactcaacaacaaatttgcatttttatgcactaattgtgagttttcatttaatcatcttttgctggcgacaggaagagcctgatggtgattttgctaaaaaagcctgaaatgccagcataaacggcaagcgggtggtgtaaaatggatgttgacaaaatatatgatttatcgatacaattcaccacgattttatgtcccgtcctcggtaccaaatcccagcagtatttgcgtcttttactcagaaagagtaaaatatgccacgtttcaggcgcggggtggagcagcctggtagctcgtcgggctcataacccgaaggtcgtcggttcaaatccggccccgcaaccactttcccattaagtactttttcaaatatactgtgaggactaggtccttcgtagccggatttgaaagaattcttctggaaggtgttccagatcgcaattgcggtctcagggttcagttatctaaagccccgatttatcggggttttttgttatctgacttcagaataactgggctatacgccctttttttatgtcttggggtgggtttgtccacattagagcaaaaattaacagagatgctcactgcgccagttgaagcgcttggctttgagctggtcggcatcgaatttattcgcggtcgcacatccacactgcgcatctatattgatagtgaagatggcatcaatgttgatgattgtgctgatgtgagccaccaggtcagtgctgtcatggatgtcgaagatccaatcaccgtcgcttacaacctggaagtctcttcgcctggtctcgaccgtccgatgtttactgctgaacactatcaacgtttcaccggtgaagaagtttcgctggtgctgcgtatggcggtacagaaccgtcgtaaatggcagggcattatcaaagcggtagacggtgagatgatcacggtaaccgtcgaaggcaaagatgaagtgttcgcgctgagtaacatccagaaggcgaacctggttccccacttttaacagtctggattgaggtgaaaggccccgatgaacaaagaaattttggctgttgttgaagccgtttccaacgaaaaagcgctgccgcgcgagaagattttcgaagcgttggaaagcgctctggcaacggcgaccaagaaaaaatacgaacaagagatcgacgttcgcgtagaaatcgaccgtaaaagcggtgatttcgacaccttccgtcgctggctggtggttgaagaggtcactcaaccgactcgcgagatcacgctggaagccgcgcgttacgaagatgaaagcatgaacgtcggcgactacgttgaagatcagattgaatctgtcaccttcgaccgtatcaccacgcagaccgctaaacaggttatcgtgcagaaagtacgtgaagctgagcgcgcgatggttgtcgatcagttccgcgagcacgaaggcgagatcatcaccggcgtggtgaaaaaagtaaaccgcgacaacatcactctggatctgggcagcaacgctgaagccgtgatcctgcgtgaagatatgctgccgcgtgaaaacttccgtccgggcgatcgtattcgcggcgtactgtacgccgttcgtccggaagcgcgcggcgcgcagctgttcgtgactcgctccaaaccggagatgctggtcgaactgttccgcattgaagtgccggaaattggcgaagaagtgctggaaatcaaagccgcggcccgcgatccgggttctcgtgcgaaaatcgccgtgaaaaccaatgacaagcgtatcgacccggttggcgcttgcgtaggtatgcgcggcgcgcgcgttcaggcggtttctaccgagcttggcggcgagcgcatcgatatcgtcctgtgggatgataacccggcgcagttcgtgattaacgccatggcgccggctgacgtcgcgtccatcgtggtggatgaagataaacacaccatggacatcgcggtagaagcgggcaacctggcgcaggcgatcggccgtaacggtcagaacgtccgcctggcatcacagctcagcggctgggaactcaacgtcatgaccgttgatgacctgcaggctaagcaccaggctgaagcccatgccgctatcgataccttcaccaaatatctcgatattgatgaagatttcgcaaccgtactggttgaagagggcttctcctcgctggaagaactggcctatgtgccgatgaaagaactgctggaaatcgacggccttgacgaagcgaccgttgaagcacttcgtgagcgtgcgaaaaacgcactgactacactggcgctggctcaggaagaaagcctgggagacaacaaacctgccgacgatttactgaatctggaaggtttggaccgtgctctggcatttaagctggctgcccgtggtgtttgtacgctggaagatctcgccgaacagggcgttgatgacctggctgatatcgaaggtatgaccgacgagaaagctggtgaactcatcatggctgctcgcaacatttgttggttcggcgacgaagcgtaataaactgtagcaggaaggaacagcatgacagatgtgactattaaagcgctggcctcagaaattcagacctctgtggatcgcctgatacagcaatttgctgatgcaggtattcgcaaatcggctgatgattctgtgaccgcgcaagagaagcaaaccttgttaacgcacctgaaccgtgaacacggctcggcgcctgacaagctgacgttgcagcgtaaaacgcgcagcacgttgaatattccaggtaccggtggaaagagtaaatcggtacaaatcgaagtccgcaagaaacgcacctttgtgaaacgcgatccgcaagaggctgaacgcctggccgcggaagagcaggcgcagcgtgaagcggaagagcaagcccgtcgtgaagctgaagaagcagctaagcgcgaggcgcaattaaaagctgaacgtgaggccgcagaacaagctaaacgtgaagtcgctgaaaaagcgaaacgtgaagccgcggaaaaagacaaagtgagcaatcaacataccgacgaaatgaccaagaccgcccaggctgaaaagacccgccgtgagaacgaagcagcggagctgaagcgcaaatcggaagaagaagcacgccgcaaacttgaagaagaagcgcgccgtgtagcggaagaagcacgccgtatggctgaagaaaatgaaaaaaactggagtgaaactccggaaaccccagaagaaacgaccgactatcacgtaaccacttctcagcatgcgcgtcaggctgaagatgataacgatcgtgaagttgaaggcggtcgcggccgtggccgtaacagcaaagctgctcgcccggcgaagaaaggcaacaaacacgctgaatccaaagctgaccgtgaagaagcccgtgcggccgttcgcggcggtaaaggcggcaaacatcgtaaaggttcttctctgcagcagggcttccagaagccggctcaggccgtaaaccgcgatgttgtgatcggcgaaaccatcaccgttggcgagctggccaacaaaatggcggtcaaaggttctcaggtcatcaaagcgatgatgaaactgggcgcgatggcgaccatcaaccaggtcatcgaccaggaaaccgctcagctggttgccgaagagatgggccacaaagttatcctgcgtcgtgaaaacgagctggaagaagcagtaatgagcgaccgtgacaccggcgctgcggctgaaccgcgcgcaccggtagtgaccatcatgggtcacgttgaccacggtaaaacctctctgctggactacattcgttctactaaggtcgcctccggcgaagcgggtggtattacccagcacatcggtgcgtaccacgtagaaaccgacaacggcatgatcaccttcctggataccccgggccatgccgcatttacctcgatgcgtgctcgtggcgcgcaggcgacggatatcgtggttctggtggtggcggcagacgacggcgtgatgccgcagactgtggaagctatccagcacgccaaagcggcgcaggtgccggtggtggttgcagtgaacaagatcgataagccggaagcggatatggatcgcgtgaagaacgaactctcccagtacggcgtgatgccggaagagtggggcggcgaagcgcagttcatcccagtatcggcgaaagttggtaccggtatcgacgatctgctgaacgctatcctgctgcaggctgaagttctcgaactgaaagcggtacgtaacggtatggcgagcggcgcggtcatcgaatccttcctggataaaggtcgtggtccggtggctaccgtcctggttcgcgaaggtactctgcacaaaggcgatatcgtactgtgtggctttgaatatggccgcgtacgtgcgatgcgtgacgaactgggtcgcgaagtgctggaagcgggtccgtccattccggtggaaatcctcggtctgtccggcgttccggcggcgggtgatgaagttaccgtcgttcgtgacgagaaaaaagcgcgtgaagttgcgctgtatcgtcagggcaaattccgtgaagttaaactggctcgccagcagaaatctaaactggaaaacatgttcgcaaacatgaccgaaggcgaagttcacgaagtgaacatcgtgctgaaagcggacgtgcagggttctgtcgaagcgatttccgattccttgctgaaactgtctaccgacgaagttaaagtgaagatcatcggttccggcgtaggtggtatcaccgaaaccgacgcgaccctggctgcagcttccaacgcgattctggttggcttcaacgttcgtgccgatgcttccgcacgtaaagttatcgagtcagaaagcctggatctgcgttactactccgtcatctataacctgatcgacgaagtgaaagcggcgatgagcggcatgctgtctccggaactgaaacagcagatcattggtctggctgaagtgcgtgatgtcttcaaatcgccgaaattcggcgccatcgcgggctgtatggttaccgaaggtacgattaaacgtcacaacccgatccgcgtactgcgcgacaacgtggttatctatgaaggcgagctggaatccctgcgccgcttcaaagatgacgttaacgaagtccgtaacggcatggaatgtggtatcggcgtgaagaactacaacgacgttcgcgttggcgatatgatcgaagtgttcgaaatcatcgaaatccagcgtagcatcgattaatcgtcagatagctaagcgtaggccgggtaagcgaagcgccacccggcaataattctaaaaaggggcttttggccccttttttgtctttattctggagaatttattatggcgaaagaatttggtcgcccgcagcgcgtggcccaggagatgcaaaaagaaattgctatcatcctgcagcgtgaaatcaaagacccgcgtctgggtatgatgaccaccgtttccggcgtagaaatgtcccgtgacctggcctatgccaaagtgtatgtcaccttcctcaacgacaaagatgaagctgcggtgaaagcgggcatcaaagcgctgcaggaagcgtctggctttatccgctccctgctgggcaaagcgatgcgcctgcgcatcgtgccggaactgactttcttctacgacaactcgctggtcgaagggatgcgcatgtccaacctggttaccagcgtggtgaaacacgacgatgagcgtcgtgtgaacccggacgacagcaaggaggactaatgagtcgtcctcgtcgtcgcggccgcgacgtgcacggtgtattgctgctggataagcctcagggcgcctccagcaacgatgtgctgcagaaagtaaagcgcatttataacgccaaccgcgctgggcataccggcgcgctggatccgctggcgaccggtatgctgccggtttgtcttggcgaagcgactaagttttcccagtatctgctggactctgataagcgttatcgcgtgatcgccaaacttggtcagcgtacggatacctccgacgccgatggacaggtggtggaagaacgcccgctaacctttagcgaagaagagctggcggcggcgctggatagcttccgcggcgagactcagcaggtgccgtcgatgtactcggcgctgaaatatcagggtaaaaaactatacgaatacgctcgtcagggtatcgacgttccgcgtgaagcccggccgattacagtctatgagctgctttttattcgccatgaaggcgatgaactggagcttgagatccactgttcgaaaggcacctacatccgtacgattatcgatgatttgggtgagaagcttggctgcggcgcgcacgtgattttcctgcgccgcctggcggtgagcaaatacccggtcgagcggatggtgaccctggagcagctgcaggcgctggtcgaacaggcggcggcggaggatattcccgccgctcaactgcttgatccgctgttgatgccgatggacagtccggcttcggattacccgctggttcatattccagaaacttccgcggtctactttaagaacggtaacccggttcgtcagtcaggcgcgccgctgaacgggctggtgcgggtgatggaaagcgagtccggcaagttcctcggcatgggcgaaatcgacgatgaaggtcgcgtcgcgcctcgtcgtctggtggtggaatacccacagtgagcgcttttgttgcgataaaagcctgctacgagtagaatatcgccgcttaacgtccgctaaagtgttttaacattttcgggcgttgcatcaggggttgctgaattagagatcggcaccctttctttacttataattttggagtttgaaaatgtctctaagcgttgaagctaaagcacaaatcgtttctgagttcggtcgtggcgcaaacgacagcggttctactgaagttcaggttgcactgctgactgcacagatcaaccacctgcagggtcactttgcagagcacaaaaaagatcaccacagccgtcgtggtctgctgcgcatggtttctcagcgtcgtaaactgctcgactacctgaaacgtaaagatgttgcacgttactccgcgctgatcgagcgtctgggtctgcgtcgctaattctgcgagtttcagaaaaaggggcctcacggccccttttttcgaccaggcggcagcaattcattaaaaactcatgtattgttgctattaatgatcttcatgcagaggttcgcgcggctaatgagaggcttcatccgcaggggcgggtaaaggttgtcattagtcgcgaggatgcagaggatcgggtcatcagacgcgatatcgtggatatggcgtcatttttagataaaaggatagaattttgcttaatccgatcgttcgtaaattccagtacggccagcacaccgtaaccctggaaaccggcatgatggcgcgccaggcaacggccgctgtgatggttagcatggatgacaccgcggtattcgttaccgttgtgggtcagaaaaaagcgaaaccgggccaggacttcttcccgctgactgttaactaccaggagcgtacctacgctgccggtaaaatcccgggtggcttcttccgtcgtgaaggccgtccaagcgaaggcgaaaccctgatcgcgcgtctgattgaccgcccggttcgtccgctgttcccggaaggcttcgttaacgaagttcaggttatcgctaccgttgtttccgttaacccgcaggttaacccggatatcgtcgcgatgatcggcgcttccgcagcgctgtcgctgtccggtattccgttcaatggcccaatcggcgccgctcgcgtgggttacatcaacgaccagtacgtactgaacccaacccaggaagagctgaagtccagcaaactggatctggtggttgccggtaccgaagcggccgttctgatggttgaatccgaagctgaactgctgagcgaagaccagatgctgggcgcggtggtctttggccacgagcagcagcaggttgttattcagaacatcaacgacctggtgaaagaagccggtaaaccgcgttgggactggcagccggaagtggttgacgccgccctgaacgcgcgcgttgctgcgctggctgaatcccgcctgagcgatgcttaccgtatcaccgacaaacaagagcgttacgctcaggttgacgtgatcaaatctgaaaccatcgctacgctggttgccgaagatgaaaccctggacgccaacgaactgggtgaaatcctgcacgctatcgagaaaaacgtcgtccgtagccgcgtactggcaggcgagccgcgtatcgatggccgcgaaaaagacatgatccgtggtctggacgttcgtaccggcgtactgccgcgtactcacggttccgcactgtttacccgtggcgaaactcaggcgctggttaccgcgactctgggtaccgcacgcgacgcgcagaacatcgacgaactgatgggcgagcgcacggactccttcctgttccactacaacttccctccgtactccgtaggcgaaactggcatggttggttctccgaagcgtcgtgaaatcggtcacggtcgtctggctaagcgcggcgttctggccgtgatgccaacaatcgacgaattcccgtacaccgttcgcgtggtatctgaaatcaccgaatccaacggttcttcttccatggcttccgtctgtggcgcatctttggcgctgatggacgctggcgtgccggtgaaagccgccgttgcgggtatcgcaatgggtctggtgaaagaaggcgataacttcgtcgtactgtccgacattctgggcgacgaagaccaccttggcgatatggacttcaaagttgcgggttctcgcgacggtatctctgcgctgcagatggatatcaaaattgaaggtatcaccaaagaaatcatgcaggttgctctgaaccaggctaaaggtgcgcgtctgcacatcctgggcgtgatggaacaggcgattaacgcgccgcgcggcgacatctccgaattcgcaccgcgtatccacaccatcaagatcaacccggacaagatcaaagacgttatcggtaaaggcggttctgttatccgtgccctgaccgaagaaaccggcaccaccatcgaaatcgaagatgacggtaccgtgaagatcgcagcgaccgacggcgacaaagcgcagcacgctatccgccgtatcgaagagatcaccgctgagatcgaagttggccgtatctacaatggtaaagtgacccgtatcgttgactttggcgcattcgttgccatcggcggcggtaaagaaggtctggttcacatctctcagatcgctgacaagcgcgttgagaaagtgactgattacctgcagatgggtcaggaagtaccggttaaggttctggaagttgaccgtcagggccgcgtacgtctgagcattaaagaagcaactgagcagactcagccagctaacgcgccggaagctccggctgcagagcagggcgagtaaggttgccgattgccctccgcttcggcggagggcctattccgggcaggatgcctttttgcagccggggaactggacgttcatccaatcgttgtcttcgggagtgggaaatgaagccttttctgcgctggtgtttcgtggcgacagctctcacgctggcaggatgcagcaactctgcctggcgtaaggacgccgtcctcgcggtaccattgcaaccgactttgcagcaagaagtgattctggcgcgcatggaacaaattcttgccagtcgggctttaaccgatgacgaacgcgcacagcttttatatgagcgcggagtgttgtatgatagtctcggtctgagggcattagcgcgaaatgatttttcacaagcgctggcaatccgacccgatatgcctgaagtattcaattacttaggcatttatttaacgcaggcaggcaattttgatgctgcctatgaagcgtttgattctgtacttgagcttgatccaacttacaactacgcgcacttaaaccgcggcatcgctctgtattacggtggccgtgctaagttagcgcaagatgatctgctggcgttttatcaagacgatcccaatgatcctttccgcagtctgtggttatacctcgccgagcgtaagcttgatgagaagcaggcgcttgaagcactgaaacagcgcttcaacaagtcggacaaagagcaatggggatggaacattgtcgagttctaccttggcgacattagcgaaaaagagctgatgacccgtctgaaggcagacgcaacggataacacctcgctcgctgagcatctcagtgaaaccaacttctatttaggtaagtactacctaagtctgggggacaaggacagcgctacggcactgttcaaactggcggtcgctaacaacgttcataactacgttgagcaccgatacgcattgttggaattatcgctcttgggccaggagcaagatgacctggcagaatcggaccagcaatagctgacgaacacacatcagccctttttttgattgccatcaccttcgcgggtgagggcgttgttgttcgttaatacacctactttgagccggttcacacttttcaatgaaaattactctaaattttcacgatgagttatgtagactggccgccattaattttgaggcacacgtactacatggctgaattcgaaaccacttttgcagatctgggcctgaaggctcctatccttgaagcgcttaacgatctgggttacgaaaaaccatctccgatccaggctgagtgcattccgcatctgctggacggccgcgacgttctgggtatggcccagaccggtagcggtaagaccgcagcgttctctttaccgctgctgaacaacatcgatcctgagctgagagcaccacagattctggtgctggcgccgacccgcgaactggcggtacaggttgctgaagcaatgacggaattctctaaacatatgcgcggcgtaaacgtggttgccctgtacggcggccagcgttatgacgtgcagctgcgcgccctgcgtcaggggccgcagatcgttgtcggtaccccgggtcgtctgctggaccacctgaagcgcggtacgctggatctctctaaactgagcggcctggtactggacgaagcagatgaaatgctgcgcatgggctttatcgaagacgtagaaacgattatggcgcagatcccggaaggtcatcagaccgctctgttctccgccacgatgccggaagcgattcgtcgcattacccgccgcttcatgaaagagccgcaggaagtgcgcattcagtccagcgtcaccacgcgcccggacatcagccagagctactggacagcttacggcatgcgtaaaaacgaagcgctggtgcgtttcctggaagcggaagactttgatgcggcgattatcttcgtgcgtaccaaaaacgcgaccctggaagtggcagaagcgctggagcgtagcggctataacagcgccgcgctgaacggcgatatgaaccaggcgctgcgtgagcagactctggagcgcctgaaagatggtcgtctggatatcctgatcgccaccgacgttgcggcccgcggcctggacgttgagcgtatcagcctggttgttaactatgacatcccgatggattccgaatcttacgttcaccgtatcggccgtaccggtcgtgcgggtcgtgcgggtcgcgcgctgctgttcgttgagaaccgtgagcgtcgcctgctgcgtaacatcgaacgtacgatgaagctgacgatccctgaagtagaactgccgaacgcagaactgctgggcaaacgtcgtctggagaaattcgccgctaaagttcagcagcagctggaaagcagcgatctggaccagtaccgtgcgctgctggctaaaatccagccgaccgcggaaggcgaagagctggacgtggaaacgctggccgctgcgctgctgaaaatggcccagggtgaacgttctctgatcgttccgccggatgcgccgatgcgtccgcgtcgtgaattccgcgatcgtgatgaccgtttcgaacgtcgtggcgaccgtaatgaccgcggcccgcgtggcgatcgtgaagatcgtccgaagcgtgagcgtcgtgacgtgggtgagatggaactgtaccgcattgaagtgggccgtgatgacggcgttgaagttcgtcatatcgttggcgcgatcgctaacgaaggcgacatcagcagccgctacatcggcaacatcaagctgttcggttctcactccaccatcgaactgccgaaaggtatgccgggcgaagtgctgcagcactttactcgtacccgcatcctgaacaagccgatgaacatgcagctgctgggcgatgcgcagccgcgcaccgaacgtcgtggcggcggcgagcgtcgtgaaggcggtcgtggcttcggcggcgagcgtcgtgaaggcggtcgtagcttcggtggcgaacgtcgtgaaggcggtcgtggtgaaggtcgtcgtttcagcggcgaacgtcgtgaaggcggccgcgcgccgcgtcgtgacgatgcttccgcgccgcgccgtgatgattccgcgggtcgtcgtcgtttcggtggcgatgcgtaataagcgcaatccgttagcgtaaagtaaataatacagccccgatcgtcatgattggggctttttttatttcttttgtactcgtgtactggtacagtgcgtcatgctcaacgtgagcgaagtattttcgactggagatttcggcaaatggcgacactaaccactacggccacccgaccgtctttatttggcggcgtggtgattatcggcggcacaattattggcgcgggcatgttctcgctgccagtggtcatgtccggcgcgtggttcttctggtcgctggcggcgctggtttttacctggttctgcatgctgcactccggtttaatgattctggaagccaaccttaactaccggattggctccagcttcgacaccattaccaaagacctgctcggcaaaggctggaacctggtgaacggcgtgtcgatcgcctttgtgctgtatatcctgacctacgcctatatttcggcgagcggttcgatcctgcaccacaccttcagtgaaatgtcgctgaacgtaccggcgcgcgctgcgggcttcggctttgcgctgctggtggcctttatcgtctggatgagcacgaaagcggtgagccgcatgacggctatcgtactgggcgctaaggtgattaccttcttcctgaccttcggcagcctgctggggcacgttgagccgacgacgctgtttaacgtcgtggagaagaatgcctcctatgcgccatacctgctgatgacgctgccgttctgcctggcctcgtttggctatcacggtaacgtgccgagcctgatgaaatattatggtaaggatccgcgcaccattacccgctgtctgatttacggtacgctactggcgctgggtctgtatgtggtctggctgctggtgacgatgggtaatatccctcgtcctcagtttatcggtatcgcccagaagggcggcaacattgatgtgctggtgcaggcgctgagcggcgtgctgaatagccgcggtctggatctgctgctggtggtgttctccaactttgccgtcgccagttccttcctcggcgtgacgctggggctgttcgattatctcgcggatctgtttggctttgacgatagcgcgatgggacgctttaaaaccgcgctgttgacctttatcccgccgatgatcggtgggctggtgaaaccagatggtttcctttacgccatcggctatgccggcctggcggcgacggtatgggcggcgattgtgccggcgctgctggctcgcgcttcgcgtaaacggttcggcagcccacagttccgcgtttggggcggaaaaccgatgattgtgctgatcctgctgttcgggctcggcaacgcggtggtgcatttcctgtcgagctttaatttgttaccggtttatcaataaccgcattgcccggtggcgtggcgcacaccgggcttaccacgtcactaaccaaacaattcctctttcacctgcatcgctaaatcaaacgaatgcaggcgcgcctggtggtcgaagatctggccgttgaccatgatttcgtccgcttccgtttcgcgaagaatcgacgctaacccatggcgaactttggtcttatcgccaaccagcgacatgctcaatgcctgctgtacaccatactgctcggacgctgaccacagctgatgcatattttccaccggcggcggcaactgcccggtttcaccgcggcgcagcttaacgaacgcctgctgcatagaggtaaagaggaactccgcgtcgcgattactatcggcggcgataatattgatacataccatcgcgtacggtttttcgagccgcaccgaaggtttgaagttgctgcggtacagatgcagagcctggaatagcatgtccggtgcgaagtgagaggcgaaggcaaaaggcagaccaagctgcgccgccagctgcgcgctgtacaggcttgagcccagtagccacactggaattcgttcgccatagccgggaaccgggcgcacctgcggattagcctcgcgagcgtcaaaccagtccaccaactccgccacatcgcgcgggaaattatcgacatcgccgctcatatggcgacgcagcgcgcgcatggtcggctgatcgctgcccggcgcgcggccaaggccgagatcgatacgtccgggatacagcgtattcagggtgccgaactgttcggcgatcactagcggcgaatggtttggcaacatcacgccaccggatcccagatgcagggtggtggtattggcggcaagatagcctatcaacaccgaggtcgccgcgctggcaatgcccaccatattatggtgctccgccagccagtatcggtgatagccgcgggattccgccagttgggcgagagcgagagagtgggagaaggcttctttagcagaagatccctgcgggatcggcgccagatcgagcaccgagaacggaatggttttatcagtcataacagctcactttgtcgacggtgaatcttttaatagtgcattaaaaattaataaccgttgttaacaaagtgagcttttacacttcaccttacgcctgcagttccagcccggccagccgtttccagtagccgttgcaatcgctgttggcggtgagatccagcggcgcagcaccattttcgttggcgcggaaggcgtcgagcatggcgaaggtctcgctgcccatcggcgacaggcgcaccatatccaccagaccgtgcatcgaggttaactcgttgccaaggttatagacgtagccgctcatcgtctgaatgccgttaagcacaaacacctgctggttctcctgcgacagcatgctgcgcccggttgggtacttgatgcagcaggtttcgcattcgtcctttggccggtcttccgagcgggcggtaaagcagcgcgcggaataagccagcggcagatggccgtagctcagcacttcgacttcaaactggttgcgaatacccagctcttcgcactgggtcagtaaattagccagccagtcgcgggaaagctccaccggcatgcaccaacgcgtcataccctgcttcagcagcaggcgcagggtgacggcgttgtagcagttcagcgcatgaccggcgacgaaaggcagtttgcgttcggcacagagattgaccacgccgaggtcgctggcttcaatcagaaattcgccgttctcgacatagcgcttcagctcgcccagttcggaggaggcctgcaccagcgcgagggtagaaagcaccacctgcttgccgctaccggccagcactttcgccatttcgatccaatcgccgactttggttgcgcggcgcttactgcacaccgcttcgcccagataaatagtgtcagcgctacagtttgccgcctgctggtaaaaatcttccagcgtctcttttggccagtagtacagcaccggccctaatgaatatttcatgtttctcactgccatttacggtgataggcgccaagggtggtttgcgttccttcggacatcgaaccaagggtttccatccatgcagattgcggcacgaagttctgcggatcggctttacagcgatcgatcgcctgacgccagacttttgctacctgggtgacgtatgccgggctgcgctgacggccttcaatttttaccgaagcgatattggcggccatcagttctggcaacagttccagggtgttgaggctggtgggttcttccagcgcgtggtagcgctcgccgtcgaccaggtagcggcctttgcacagtgtcggataaccggcattttcgccatcctgatagcgatcgatcagcacttcgttaaggcgtgactccagcccctgcggcgtttgctgccagcggacgaagcgcgcgggcgaacaggccccgacggtatttggtgattcgccggtgagatacgacgagagatagcagcggccttccgccatgatgcataagctaccgaaggcgaagacttccagtggaaccggcgtggcgcgcgctaactgtttcacctggtgaatggataacacccgcggtagtacgacgcgggcaacgtcaaagttgcggtgataaaaacgtaccgcctcttcgttggtggcggacgcctgtactgaaacgtgacgttcaatgtgcggatagcgttccgcggcgtactccagcatggcgatatcggcgaggatcagcgcgtcggcgcccaattgcgcggccatatccacagcacgctgccaacgggcataaccgtcgggatgggcgaaggtgttaatcgcgatatgtagcttgcggcgatgctggtgcacaaagctgacggcttcctgtaatttcttttcggtgaaattaaggccggcaaagtggcgggcattggtgtcatctttcagcccgatatacacggcatcggcgccgttttcgatggccgccttaagtgccgggaggttaccggcggggcagagcagctccataatttttcctgaaaaacgcggccggtcagggacgcaaaatggttaacgagctgggattttagttaaccttctggtgacaatttttgatttgaggcagttaaaagcgtattggtgggctcaatagctggcggccatcatcgcgattttgttgatttacgccgctatgtcgtttatttgatatggcacaatagcgaaactattgcatgcatggagtgaagcttgtgttggatgaactgcgttcccggctggtccgttttggcccgtctttaatgagcgtgccggttaagctggtgccttttgccctcaagcgccaggtgctggaacaagtattgagctggcaatttcgccaggcgctggcggatggagaactggagtttctcgaaggtcgctggttaagtattaatgtgcgcgatattggtctgctgtggtatacctcggtagtcgacggtcgtctggtagtcagccagcaggctgacgccgacgtcagctttagcgctgatgccagcgatctgctgatgattgccgcgcgtaaacaggatccggatacgctattcttccagcgtcgtctggtgattgaaggtgatactgagctgggtctatacgtgaagaacctgatggatgccatcgagctggagcagatgccgaaagcactgcgcgtcatgctgctgcagatggcggattttgtcgaagcaggcctgaagagcccgcagaaacctgaacagacatcggtaggtgaggcatgctgattcgagtggaaattgggattgatgcgccgggtatcgacgcgctgttgcgccgtacgttcggcagcgacgcggaagcgaagctggtgcacgatctgcgtgaagatggtttgatcacgctgggcttagtcgccactgacgatgaaggccaggtggtgggctacgtcgcctttagcccggtcaccgtcgaaggtgaagagctgcagtgggtcggtctggcgccattggcggtagatgaaagctatcgcggccagggtattggccgacagctggtctacgaagggctggattcattaaatgaatttggctacgccgcggtggtcacgctgggcgaaccggcgctgtatggccgtttgggctttgaacccgccgccgcgttcgatttacgctgccgttggccggacaccgctgaagccttccaggtacaccgtctggcggatgacgcgctgcagggcgtacacggtctggtcgagtacagcgatcatttcaatcgcttctgagcccctccagcagggtctcaaacgaaccatccccggcaacgaggcgctctttctggcgcttcgttagctgcttgatgcgatactccagccgcagagcgagtgagtggtcaccaactttctgactaaacgccagcgccagttcgcctttaccgcgcagcgctttcgcacctttgccttcctgatgctgaagaaagcggcgcggaacatcggtggtaatgccggtatacaggcggttatcagcggttcgaataagatagagaaaccagcacacggtaataacgtcagtctgttagggtgtgtgcaccatagcataatggagaataaagatggatacgcttgccgcgattagccgctggctgggtaaacagcacgtcatcacctggtgcgtcgcgcgtgatgacgagctgtggtgcgccaatgcgttttacgtttacgaccagaataacgtcgctttttatctgctgagcgatgaaaaaacccgtcacggccagatgaccggcgaacgcgcgaaggtcgccgggacggtcaacggccagccaaagaccgttgccttgatccgcggcgtgcagtttaagggggagatccgccgccttcacggtgacgaagaggcagagatgcgcaaacgctacgttaaacgctttccggtcgcccgcatgttgtcggcgccggtgtgggagatccgtcccgacgagcttaaatttaccgacaacacgctgggttttggcaaaaagctatattggctgcgcgactcaagcccctagcaggcgtagcgcctcgcgattgaacgccggcagatcgtccggggttctgctggtgactaactgatcgttatcaagcaccacttcctgatcgtaaaactcaccgccggcgttttttacgtcgaccacgataggtttaaccgccgtgagtttacgcccgcgaatgacatctgcgctgatgagtagctgcgggccgtggcagatggcaaagaccggcttaccgctattcacgaagtcgcgagtaaaagtgacgaagcgctcatcaccccgtaactggtccggtgaatagccgccaggcagcaacagagcgtcaaactgcgccggcgtcacgtcatcaatcgctttattgatcgccacttcagcctcgccttgtttcccttttaccgtttttcctgcctgtttctcaatcgtcacgacctgatgcccggcaagtttaaaggcctcggcaggagaggtgaattcggcgtcctcaaagtcgtcggtgattagtacggcaatctttttactcattcttcctccgatcttttggcagtgaatgaggcatttccatgatgatggtggatacttacctcgtaagctattaagcctggaacatgtggggcaaagtgcaaggcagacaattccgtaaggagattcgatgagtcaggtattattaaccggcgcgactggtttagttggtgggcacttacttcgtcttctacagagtgagccgggcattagcgcgattaccgcgccaacgcgccgtccccttgctgtggcggagggggtattcaatccacacgatccgcagttgaccgatgcactggcgcaggtggttgatcctgtcgatatcgttttctgctgcctgggcaccacgcgccgggaagcggggagtaaagaggcgtttgtgcatgctgactatacgctggtggtggatacggcgctggtcggcaagcgactcggagcgcaacatatgctggtggtcagcgcgatgggcgccaattcgcattcgcccttcttctataaccgcgtgaaaggagaaatggaagaagcgctgattgcgcaggagtggccgcggctgaccattgcccgtccttcgatgttgctgggggatcgggagcataaacgcgccaatgaaacgctctttgcaccgctatttcgttttctgcctggagactggaaagccattcaggcccgcgatgtagcgacagccctgctcgcggaggcgctggcgccgagccatgaaggcgtccagatcctgacctcgtctcagctacgggaacgcgccgcccgacaggcggattaaccattttcaaatttgggctgcaggcgtagtattcacctccttatttattatcacttctccctggggaatgctatggctggtcagtcttcatctcaggcggcatcaccatttcaatggtggaaacccgcgctgttctttctcgtcgttatcgttggtctgtggtacgtcaaatggcagccgtattacggtaaagcctttacggccgcggaaacccacagtatcggtaaatctatcctcgcgcaggctgatgtaaacccgctgcaggcggcatgggattacgcgatggtttatttcctcgcggtctggaaagcggcggtgctcggcgtgctgctcggttcgcttattcaggtgttgatccccgcgactggctgcagaggacgcttgggcaatcacgttttcagggcacgctgctgggagcgattttttcgctgccagggatgatgtgtacctgctgcgccgcgccggtcgccgccggtatgcgtaaacagcaggtgtcgatgggtggagcgctggcgttctggatgggcaacccgctgctgaacccggcgacgctggtctttatgggcttcgtgctaggttggcagtttgctctgatcagactggtggcggggctggctacggtgctggtggtggcgacgctggtgcaaaaatgggtaaaagaggcggcgacgcagccggtagcggcagaagacgttagccaactgaagcacgatgagggcagttttatcagccgctggctgcgcgcgctgtggtcgctgttctggagtacgatcccggtttacatcctcgcggtgttggtactggggcggcacgggtttggctgttcccgcacgccgagggcgcggtcgataacacgctgttctgggtgttcgcaatggcgatagccggttgcctgttcgttatcccgacggcggcggaaatcccgattgtgcagacgatgatgctggctggaatgggcaccgcgccggcgctggcgctgctgattaccttgccagcggtgagcgtaccgtcgctaattatgctgcgtaaggcgttcccggctaaagcgctgtggctaaccggcgggctggtggcgttgtgcggggcgatcgtcggcgcgctggcgctggtgtaattttccggggcggggctgtggccccggcgccggattttgtgccgggttgcggctatgccttacccggcctacaacggatacagggcgtttatttaatataggtaaaagcggtggtgacgcggctcacgccgctaacccggctggcgatatccgccgccgcgcggccttcacggtcggtgaccaggcccatcaggaacacttcgctgttttcggtcgtcactttcacattggaagacttcacctgatcgctgcccagcagttgggaacgaactttggtggtgatccaggtatccgacgacgcggtgcctaagccaatcggctggccttgacgtacttcattgaagacttcggtagtcccttcaacgcccatcgcgatttgtttggcgcgagaagagagatcggcggtcggcgactggccggtcagcaggaccttgccctgataagcggtgacgttaattcgcgcttctttcttaatctgttcatctttccctaaggcgctgttaacgcgtagctccagggtgctgtcatcaacctgcgtaccgaccgtacgtgggtccgttgccgctttggtgccgacggctgccgtaccgactaccgctgcggcgacgcagccctgtagcagtagcgcagaaagcaggatggcgaggggcgagagagccttcatgtgttctccttattcgtcctggtgtggaaaaagcgtgttatcaatcaaatcgcacagacaattgacggtgagcatgtgcatttcctggatccgcgcgctgcggtgtgaaggaatgcggatttcaacgtcctgctggcctaacagaccagccagctcgccgccgtcgtaaccggttaacgccacgatagtcatatcgcgggtgacagccgcttccacggctttcacgatatcccggctattgccgcgcgtagaaatcgccagcagtacgtcgccggcgtgtcccagcgcgcgcacctgtttagcatagatttcatcatgcaggcgatcgttggcgattgcggttaagaccacattatcggtatttagtgcaatggcgggtaaaccagggcgctctgtttcgaaacgattgatcatgctggcagcaaaatgctgtgcgttggcggcggaggtgccattaccacaacagaggattttgttgccgttaagcagcgactgaacgagcgtcatagccgcgcgcgagatggcgtccgggagcgcttccgcggcggcgatttgggtttgaatgctttcggtaaagcaggctttaattctgtcgagcacgggatcccttaaatcagataatacgctattcgccaaaggcgttttttagccattggatgtcgttgccggtgaaggctaccacatcgaaacggcaatccacagtatcaaaactcccattctgccgggagagccacagacgagcggccttgagaagacgatgttgcttttgcggcgtgacgctggcggcggcatcgccgtagctggcgctgcgccggtagcgcacttcgacgaacacgataaccgcgccgtcgcgcataataaggtcgatctcgccgccgcgctcgcgggcgttggcggcgataaaacgcagtccatgccgttctaaccaccgacgcgcctggttttcccaggcgtcgccggtctgtttacttagttggctgcgacgatttgcccctgttggtacttgagccatgataacttcctgttaatcacgcagtccggcgtagccgtcagatcgcccgtattgccgttcagctcgtaacctgggctctggcgcatttgcgcaaaatgattcgccagcgaccaggcgtcagcgcccatcgcatacagacgcgccagcgagtagtcgttacgcacggcggagagcgcctgctgcatcagcgccgggttactgccagccagcatcggaatttcgctatattgcaggccttccatctccagacggaaatccgggccggaagtgccctgggcgctacgggaactggcgtacagggtgacgttgctctggctgccgttgcgcatcgcgatcagcggcttgatataaccaatttgttccggggtggcgacgatataggcggcatcgatgctgccgccgctgctgaccggaacgtcgcttgggctgccgagcgaactatccacagatgacggcagtgtcgataccgggctgccggtcagcgagatcccgccgccgttgacgccggatttcagctccgccgtcgatcccagacgttgctgcagcaccgtaccgccgcccagtttcagccactcgtcggcgaacgcgctgaccacgcggtcgccaagcgcgccgcgcggcaccagcagtaacggcgtttgtttgccctgatcgtgaatatgacgcgccgcgtcgcgggcttcatcttccggggagagcgcgaaatagcacaggttcgggcggttctcgactttccccggctggttaagtgccagcacgtttagagaggtgttgcttttcatcacctcttcgacgttttctttcaacagcgggccaaccacgatggtggcgccgtcctgctgtacctgtgccagaagctggctcatcggctggcgggtggtatcgtaaattttcagctcagcagcaggattggtggtcgctacctcgggctgcggttgcgcggttggcgcgttcaccggttgtgctgccggttgtgcttccggcgttgcggcaaccggggcgggtagcggagcggctgctggttttgcggcaggcgcggcctgcgtttccgctggtgcctgcaccggcgcgacctggctgccggtggcggtgagatcgccgacttccgcctgcgaagggctcaccacgtcgttattgctggcaacattcgccgcctgggcgacctgcgccggtactgcgctaccctggaccgctggggcgccattcttcgccgcttcaaaaccctgctggatagtgcggccgaaaatcgccgcctggccgttcagaggcagtagcagggcgattttattggtcgaggccggtttatagttttgcatattcaccagcgcggtgggcagcatctgcgcccccgggttctgcggataacggatttgccagtctttgacgcccgctttcagcatcgccggatcgttgcggttgtcgaaccacatccgctgcagatccaaccagccctgcagcacgttttcgtcggcattaatcaccagcgcgttggcctgctgtggagtcatcgccgtcagcgctttccacgtggcgtcgatgttttgttgtttttgctttgcctggcttagcaggggctgctgggcaatcagcgcgcgcagcagggacagagagggctgcccctggctggcgtcaatttgcgcctgccagtagcgcggctgctgatttttctcaaaactgagaggatctagtttgctcagcaatgccttagcgccctggtaatcgccttgcgccagtttgacttccaccgccagcagcgactgttcacgggcctgcgtgctgttcaggttcgacggcagttggttgtacaggtcgatagcctgctgcttcttaccttcctgcagcagtgcacgaatggcgagtaattgccagttggtcttgctatcattcgtgctttgctgcatctgctgtaggtagaaactggagttggcctgcgacgtaccctgcataaacgccgtgctttgatcctgcgtgtgggtgccgcagccagcaaaaagaagagtcgccagcaatacgggcagacagcgcgcgggcttagaacgaagaaatgttgacggtaccatatgtatccagtgatatttttttgactcaatgctcaatattaaatcggcaatacggacgagacaatgaaacaacacgaatcagcggataattctcaggggcaactgtacattgtgcccactccgatagggaatctgtctgatatcacgcagcgcgcactggaagtgttgcaagctgttgatttaattgctgctgaggatacccgccacaccggtttgctgctgcagcactttgcgatcaacgcccgtttatttgcccttcacgaccataacgagcagcaaaaggccgaaacacttttagcgaaattaaaagagggacaaaacatcgcgctggtgtccgatgccggcacgccgctgattaacgatcccggctaccatctggtgcgcacctgccgtgaagccaatatccgcgtcgtgccgctgccgggcccttgtgcagcgattgccgctctgagcgccgccggtttgccgtccgatcgtttctgctatgaaggtttcctgccggcgaaatcgaaaggccgccgcgataccctgaaggcgctggaagaagaaccgcgcaccattatcttctatgagtcaacgcaccgcctggtggagagtctggaagatatctgcgcggttctgggagaatcccgctacgtggtgttggcgcgcgaactgaccaaaacctgggagtctatccacggcgcgccgattggcgagctggtggcatgggtgaaggaagacgaaaatcgccgcaaaggcgagatggtgctgatcgtcgaaggttttaaggcccaggaagaggcgctgccggcagccgcgctgcggactctggcgctgctgcaggcggaactgccgctgaagaaagccgccgcgctggccgcggaaatccacggcgtgaaaaagaacgcgctgtataaatacgcgctggagcagcagcagtaatcactgcgcccggagttagccgggcgcggctgactattttaccggcgtcgcttcgaaaaccagtgtttgcaagggttgtagcgtgacgatagccgcttgctgatagtcagcagggaatgtcgcgttactgccgtaaacgctttttaacgtaaagcgcaatgtctctccctgcggtatctcgaaggctttagcgagatcgagataaaattgctgtggtttatctgaagggttacgtaagcccaatatcgccttatctttattccatgaggcccagccgtaaacttcgagtgcggtaggattgccgccgacccaatgggtatcaaccagcacgtcggcatttgctctcgaccattttgcagcctgcgccagggtgtcccacttcactttgttaagtagcgacggcgtgatgtacagctcctgtaattgcgtacctgtcgcgaaatagctccagacctgatcggcaaaatcgctatcggtttgcggtttttccagcccgtaataggcgttttcagcactgacaataccgtgatacatcagtgagttaagcgggaagagcggccctttacgcacaatcgaacgataagtctcggcatcccggtaagtcatccattgctgcaccggcgtccccggcccgtaaagattgatatcgtcgccctggcgccatatcgcgtcggcataaaaaagccaggaagggctggcattggtaccggtggttaaattaataaattgattaggattggcgctgcgcatgttatgcaataaagcgattgatgcatcaaaatcggaagcaaactgactacccgcaatatgcgaattcgcgttgcccataccatcaagcttaaaagaggtaatatgctcgtctttaatcagcttaataatttgttgattgaagttgttgaaatagtgcggtccggatagcgcgaatttgccatcgaccgtttcaaagccatactctttggcgtgagagacgcggatatctctgggcttgttataacctccccaaggggaaagccacagtcctacagaactttgcatgctggccgctttttctcgtactttgctgaatccctggctgaaggcggggccaaagagccatctgccggtacgatcgtcccaaccgtcatccagaagaaaggcatctaatgtgacgccgcgtccggtgataaattccttattccactcatccatccggcgtagaacatcctgctcgctataggtggtgaagaagccgatatccatccagctgttatagtgcaaatagggtttataggggcggggacgcacggcattaataaagaggtttacactgcgacgaagctgattggtttcaggaaaggtgccgaagtaggtcgtatagctgagcggtgtggcagggtcgatagcggtttttaattctacattcagattcgtggttgcctcataagcccaggtatttacgataggtttatcgggcagtataaaaaagtaatcagcaacgatcggtgaactattaatagcgccatctacatagggtgcctgagattgttttttggttgggaaaaaggttattttcgctacgtctctcgattggcccaccgccgctatagtgtaatcaatactcgcgtagtttccctttataaggttcatcttaaccgtgacgttaaaatccgggcgggtgtagtcgacgacaatagaatcattatgtttctcgacatgctttattttaaaatcagcggtgtggatgatggtttcatcaggtagtgtgagaaaaaacagttcctgcggtgaaagctgatgggcggatttttcatcttttaccttcgctgaggaatccgcatcgttaaatgaaagcgctatcgacgcgttatttaatgtgtattcagcggcggctgcgccttgagaaatcagcagggccagtaacgaaacagtgagcgcttttttcataagagagatccttgttgtcgttctatcagaggtcaataacgttagccctatcgggctaacgcgttttaatatcgtatgatgttcaggcttctgcagcctgtgatagtcggttagcggaaccgcacacgttaattttacttttcacgacttctttcatcgcatccatgccaacacgcatgtaataacgcggatcgttcccttgcgggttttcagcaaaccatgttttcaccgcggcggcgaaggcgattttgagttctgtggcgacattgaccttgcaaattcccaacgtgatagcacgacggacgtagtcatccggtacatcgcttgcgccatgcagcaccaggggatatcaaccacttcccgaatttctgccagccgttggaaatcgattttaggcgttttttgatacagcccatgagcggtaccgatcgccacggcgaggctgtcgataccggtcaattcgacaaagcgtttcgcctcttgcgggtctgtgagaaatgcgctttccgcatcaacgttaagatcgtcttccatcccgccaagccgtcccagttctgcctcaacgctgcaatccagcgcgtggcaataatcgacgaccgatttcaccagcttcacattctctgcaaacggaaaatggctgccatcgatcatcgcgctgcggaccccggcattaaccttacgacgaatatccgccagcgattcatgatggtcgagatgtagcgcaattggcatcgcgtaggtggcggagtaggcctggcagagtgcgtaaatttcctcgagcgcgatatgcttaaaggttcccggcgtgccggcaaggatcaccggcgatcgcatttcactgcacgtttcaaggatcgcctggatcgtttcggcgttgtgaatattaaatgcaggaaccgcataacctttactctgtgcatcctgcagaagatatttggtggaaataatgctcatggcgcgctccttttaagcctgccagggatgaataacaacaccttgtacgacgcgattaacggtaccgctggcggaaggcgtatccggggtgttacccacggcgagagattggttaagcgcgaagatctgggcatacatcaggaagcagaaagccagttcgacatcgctgaaacggcgtgatggcgggatgatgatatgcgggcctgcctcaataacaggatcggttcctgcggcgatggccactatccgcatggcctggcgatcgcgacgcaactcagcaagaagatccagatcgtactggcgggtataggggtggttggagataaacatcaccaccaacgtttcattattcaccagtgatttaggaccgtgacggaagccggtaggcgagtcataaaacgcggctagcttacctgccgtgagctcaagtactttcagggcggattcgcgcgcggcgccctgcaacccgccgctaccgaggtaaactatccgtttccacgctccgttgccgaaaaccccagcgttaatatcgctcaacgagttaagaatcgtctggcagctgtcagcgacatcgctgaatgtatggctattaatgaggttgggtgcgaacaccgcaaggcaactggccatcatcgtagtaatactgctggtcatcgcaaagccgcgatcgtgagtttctggcggcattaatagcggcagagcgttgtcgctatccagcgcggtttgatacaggctgcctgcttcgttgcaggtaatgggtaagtgataacactctgtaacaaactgattcgccaatttcactgcggccacgctctccgggctattacctgaacgggcgaatgagaccagcagcagtggatgagcgggatccagataatccatcggattggtcaccagatcggtagtaggaacggcgctaaaatttttaccgctatgacgagataaccacggcgcaatgatgtcgccaataaatgctgaagttccagcgccggtcaggacgatacggagatcgttttttcgtagtagcggcgtgagaaagccgtcaatctccgctcgtaaacgatcgatatgctttaaagattggatccaactgcctggttgctggcggatctcttcttcggtccaggtaccagtggttgatggcgcaggggtatatctttctgacataacgcaatccttatggtgatgatttccgctttcggtgtgggctaatgcaagtctttcgtttcgtttcactttgacttgcttttaatgtgttaaaatttacacgaaagaaatcgaaagctcaatgatgtgattaacaataaaacgaaaatggtggtgctttggtgttatttttcacgtaataaattgaaatcatatgatttttattcggatatgctgtgaactaaaaagaaaggaaaagaaaggtctgcaggcaagctgcagaccagaagagataagtggacttaaagcgaaaacgcttcaccgcgtatccaaatgttttccacccgcagctcgttatcaactgcaatcatgtcggccatttttcccggccgtaacgatcctaattgccgatccagccctaataggcgcgccgggtgtagagaagccatatgtatagcccgttcagccgtcatcccgggtaatgaactgatggtgcgcacggcggaatccagtgacagggtactccccgccaggctaccgctgagggtacgaacgatcccattacgcatttctaccctttcgccacataaggtgtaattaccgtcaggcatacccgccgcctgcatagcgtcggttatcagcacgatacgatctccagcgcaacggcaacatagctgcattgccgcaggatgtacgtgatgaccgtcggcaatgagttcaagccaggcgcggttatcggttaatccagcgccgaccatgccaggttcgcgatgatgtaaaccgctcatgccgttgtaacaatgcaccaggccatctgcaccggcatcgaaggcggaacaggtttgttcccaggttgccgcactatgccccagcatcacccgcacgccttgccgtttgagatgacggatcgcctgcagtgcccctctttttccggggcaagggcaacgacgcgcagtgtttcccgggagacggcaatcagccgatcaaactcggtaagatccagttctctgaaccattgtgccggatgggcgcctttatgcggcggcgtgaagtaggggccttcaagatagctgccaagaatttgcgctcccggaccgcctgcgtgaacgcgtcgcgcaatacgtgccagcgccgcatggatttccgctaacggcgcggtgacggtggtcggcaaccagttggcgaccccctcacgcgctttatgtttcgcaaggaggtctaacgtatccggtgcgtcatccatgacatctacgcctgcgccgccgtggacatgaatatcgatatatgcgggacacagcagctcggcatcgcgagtgagaacacccgcggggatcggctccagagccacgataacgtcattttcaaaccgtagctgatggtcatcaagccagccttgctctgtgagtaagcgtctggcgcgcagtatgcggctcatataccttcctcaacagcatgatcttcccggcagcgtcccagctcatcgaccagacatgttaacccgcgatgaccgcattccagtgcctgaagacgaaaggcttcgctggttaatccttcacgttccagcaccatctccagcagtagctgcaggttagtgccggtaatgacttctcgtccgcgtttttgcatcgccagcgtggaggcgacgcgaaacggcgtgccgccaagtaaatcagtcagaaaaataatatcttcttcgccatccagctcatttaccgcctgctccagctgtgcggtcagcagggcggtcgtggaggtttcaggaaaatctattgcaatgaattgcgactgttcgccaaggatctgtttcattgccttttccatgccgctggcaaacccgccatgcccggtcaaaatgattcctaacatcgaaaacctcttagcgttacaggaagtgacagaatttacctacaatgcccagcgcgacggtgatgccgataaggcggagcgggctccagccgcggcgcaccagccagaacatcaccagggtataaaccagcggtaaaaaggcaggcatcagcttatcgatgacatccgtttgcagtttaaccacggcatcgccggcagtgatttcaagcgttgtgcttaaacgaacataggtcgctaccagcgcgccaatcaccgtcatcccgacgatagaggcggcatggccgacttttttggtattggctttaatgagcggaatcgccgctacccccatccggtaggcatagtgcgccagaccgaagcgcaggccgagatggaccacgttgaacagaacgataaaaacgaccgcgccgaggatcgacccttgtagcgccaggctggcgccaatgccgccgcaaatcggcagcagcgttaaccagaacatagcgtcgccgataccgccgagcggcgcgccaacggcgattttggtgttctggatactgttaacgtcctgcttcgagcgctccatcgccagaataatgccgatgacaaaggtcacgaggaacggatgggtattaaagaagcccatatgtcctttcattgcccgtgccagatcgcgcggattagtgtggattttctttaatgccggcaacagtccgtacagccagccggaagcctgcatacgttcgtagttgaaggacgcctgtaatagcattgaacgccaggccacccgattaatgtcttttcttgtcaggtcggccccaatgctttgatcttcataaacgttttcattaacaccagtgagcagcgtcgtttcgctttcggccacattgggcagcgtgtgttgattagatgccatcttcgaattcctctttaggcgcatcaggttgagtcggttcgggagatttgcgtagcaggtcgataagcgccatggccagcgcggcggcagcaatggctaacaccgggagcttgagccaggccgccgcgacgaacccgatgatgaaataggggatatagacgtttttcatcatgatttttagcagtacggcaaaaccgattgccggcatgatgccgccagcgacgccaaggccatcgattaggcgctcagggagcacatctattgcggttttggcgtgttctgcgccgaagtagataggcagaaaagcacagagaaaataaaaggtacctaatgccagcaacgccaggtaattcacacgctcaataccgcgggtatcggcatttgccgccatgcgatcgcagcgcgacataacccctgacatcactgagaaaaggaacgttatccccatctgaaccgcgacggcgaagggaaccgcaacgccgacggcgacatcgggtttaacgccggtggtaatagcgaaggtggtgccgacaatggtcccgataatgacgttcggcggttgcgcgccagccagcggcgccagacccatccacaccagctccagtgtgccgccggttaatataccggtatgaagatcgccgaggatcaggcccactaagggccaaggaccaccggacgatgcatatgggttaaaccgttaaacatatccagaccggcgataaaggcgaggatacccaatgcaatggcttgaaaaagcgagatttccatggagagccccttagagcagtttataaagatccgttgccggttccgtcggaaccccttgaatgaaacactcaacgccagcagatttcagaccgttaaaggcgacaatatcgttgccgtcgacagagaccgttttcgcaatttgtcgcttcccatcggcatagtgcatattgccgacgttgatgcgcgataccggcacgccaccggaaaccagcgtcagaaaatcggcgggggatttacacaccagcagtattttttgccgatcggcggcgcgatgaatgttgtcgatgaccttctgcagagaccagaagcgtacggcaatcccctctgccagcaccatctccatcaggttctgttgtacggggtcttcagcaacctcgtcattggcaaccaggaccagattcgcccccgcgaacccgacccactgcacgccaacctggccgtggattaaacgttcatcaatgcgacttaacacaatatttggcatcgccgtttcctcttcgttgttatccgttatgagatgtcatgccctgacaggcgttatggtattgctgcaagatgttctggatgtggctgatgatgagttcatgcggcgaggcgctgagcactccttcgcgaactttcacgtactgcagtggcaaatactgactaataagcggtagcggaatggcttcattggccagattacgtaccagatgtgctaaagcattgtcgatctggctgtccggccagtagtagcgaacgcgatcggaatagctgtagccgcgcgctaaccgccgtgcgtagccatcgccgtggtagtggctttgccagtattccggacgatcgagcatgacgttttccagtaccatgcgtaatcccgaacaggattttgccggtacgatttcttcttcaatcgccgctaaagcgaaaagcgcttcacgcaatgcgaaagtcaacgccgggccgactttcaaaatcgcgaaatgatcgactaccagttggcgtagcgcatgcggggtctgataatccgtggaatgcgcttcaaagagcaatgtggcatagtcttccaccatagcgctgagggattttgctttttcagattcgtaatcaatgacttgtgcatgatcgaattccacgccaggctgtaccacgagcgcgataattcgcggccaaataccctcaagccccacactggtaaaggcaaccctgtgtgcatcgagagtggcgcgagccgcatccggggtggtgacttgtagggtgttgagggtttcgtgagcgccaccgggcacgggaacctcagtgccgataacgtaaacgagatccgatttgcctttcagggcaatacaggtttcttccgcgatttttgccagccttgcggcgcgttcagcgacaaggtcatcggttaagggaatgggatcgtctttgcatgacatactgcaatcgaggtggatttttttaaacccggcggcgacatagcttttaatcagatcgtcggcgtgggccatggcttgtgcgaccggaagatgctgccagcggtttggccccagatgatcgccgccgaggatgagcccgtcgcgggggaaccccagtgtatcggcaagatgatagataaagccgcagaaatcagcgggggtcataccggtataaccgccaaactgatcaacctgattggaggtcgcttcaacgagcaggggcgtatggtttgcctgggcaaaacgaatggcggactccagtaccagtggatgcgcggagcacaccgcgtaaataccattcgcttcaccctgtttgtgtcgcaccaccaattgtgtaagatgtttcactttcctctccaggtcagaaatcaacgatttaatctttcgttttgtttcgctttatagtgcttcagcgtgctttaaaaataaaacgaaagataatagttttccgatctgtttcacaaaagaaacataatgaaagctttcagcacggtgtggttccctttttgccgtgccaatagcgcttgcattctgctaaaagaaaggcgttaatagtcaaaacgaaatgaaacgaaagatacagccaaggatattgttatgaacagcagcgagtcatctgccgaaaagcgcatagcgggaacaagtgaaaggcgtgagcagatcatccagcggttgcgacagcagggaagcgtccaggttaatgacctggcggaggcgtatggtgtatcgacggtcacgatacgcaacgatctggcgtttctggaaaaacagggcattgcggtgcgagcatacggcggcgcgctgatttgcgatagtcatactccaggcgttgaaccttcagttgaagataaaagcgcgcttaatacggccatcaaacgccaaattgccagcgccgccgctgagctgataaaaccgggacaccgaattattctcgactcaggcactaccacctgtgaaatcgcgcgccagctccgacagcatagcgatgttatcgcgatgactaatggaatgaatgtcgcaaacgcgttgttagaagctgaaggcgtggaattactgatgacggggggcacctgcgtcgccagtcgcagtcattctatggcgatcaggctgagcagtccttgcagaactaccactttgatatgcttttcctcggagtggatgcgatagatctggaacgtgggatcagcactcataatgaggatgaagcccgtctgaaccgtaaaatgtgcgaagtcgcggagtgtatcgtcgttgtgactgattccagtaaattcaatcgttccagtttacataaaatcatcgatacgcagcgcattgataccattattgtcgatgacgggattccgcaagaaagtctggaggggttacgtaagggcgggattgacgttatcctcgtcaaatcataattcggtgtaagttgccagccggggtatggtctataacccgactggcgataggcactgacttttagggtcacgtcaccggcgccgggttaaacaccgccagctggttatgcagaccccattgatcggagaaggttttcttacgtccgctggcgacgtcgagaatgaattcgaacagtttctgcccaacctcctcaatcgtctcttcgccggtcgcgatagtaccggcattgatatccattaagtcgtaccagcggttggcaagctcggtacgggtcgccattttaatcaccggtaccgccatcagcccgtaaggggtgccgcgcccggtggtgaatacctgcacggtaatgccggaagccacctgttgagtaccgcagacaaaatcgctggccggcgtcgccgcataaataagcccgcgtttcgtcgggcgctgacccggcgaaaggacttcgacgatggcgcttttacctgatttggcaatcgaacccaatgctttttccactacgttcgccagaccgcctttcttattacccggtgacgggttggcgctgcggtcggttttccccagctccagatagttatcgtaccaggccatctcttccagcaggcgcttgccaacttcttcgttgatggcgcgcggggttaacagatggatagcatcgcgaacctcggtcacttccgagaacatcaccgtcgcgccgcagcgcaccagcaggtcggacgcatagcccaccgccgggttggcggtcacgccggagaaggcgtcgctgccgccgcactgcataccgaccactaagtccgaagccgggcaggtctcacgctgacgagcattgagtttggccaggtggcgctcggcaacctgcagaatatcatcgaccatcgatttaaagccgacatgctgttcgtcctgtaaacgcactatgcttgcgctatcgacggcgatcggctgcacgtcttcggttccctgcagcagacgttccggctgcagcttttcacagcccagaccaatcaccatcacctcaccgccaaaattggggttcagcgcgatattgtggatggtgcgaatcggtacgatcgccgccggggcgttaatcgccacgccgcagccgtacagatggtttaggccaaccacgccgtcgacgttggggtatttcggcagtaggtcgcgttcaatgatcttgaccacataatccaccacgccggtgacgcagtgcacgctggtgctgatccccagcaaatttttggtgcccacgctgccatcggcattgcgatagccttcaaaggtgtatccttccagcggcagcagcgcttccgggactttggtcgccagcggtaaggtgttcagcggtggggcggtcggcagttcgaccaatgactcttcaatccagcttccctttggtatatcgcgaacggcgaagccaatcacttcgccgtagcggatgatttcaccttgggcaggaatatcgacaagggcgactttatgaccttgcgggatatgttcaatgagggtcaggccatccggaaaacgcgttccggcgggtaaaccgcgatcgttaacaataatcgccacattatcggtagggtgcacttttatataaaacgccgtcggcgactgttgtcgaatctcaatctcagccattgtccagtgttctccagaacggtgctaataataaaaataaaacgttaattcagcttgtacctatcagaatgatgaaatacagaatgtcaggagttatagcagcaaaatgtgatcttggtcactgcttgcggtgacggttgccagcattgaacggcaatcctaagaactgtggattagcgcccataacctatggcatttgcataacgaaaatgattattaaagcgcttatattgtgattatgcatagtgcctggtcacggtgggatgattatactgagtcatgttttgcggtgttcaatatgagaataaatagcccgcttaaaaaataataaaggtattctttttcagaaaaatatctaaatgttcaagggtaaaagaaaataggcatcggttcgctatttaattctgcaaattatatttgtggttggcgagattaaacgtatagaacagcagaagtaagcaacgattaacccaaggtaaaatcatggataacgcaattttcccgaacaaatttaaggccgcgctggcggtccaccaggtacaaatcggctgctggtgcgctctggcgaatccgattagcaccgaggtattagggcttgctggtttcgactggctggtgcttgacgcggagcatgcgccgaatgatgtgaccacacttatcccgcaactgatggcgttgaagggcagccatagcgcgccggtcgtgcgcgtgccgaccaacgaaccgattatcatcaaacgcatgctggacatcggtttttacaacttcctggtgccgtttgtcgaaaccgctgaacaggcggcgcaggcggtggcatcgactcgctatccgccggaagggatccgcggggtctccgtttctcatcgcggcaatatgttcggcaccgtaccggactacttcactcagtcgaataacaacatcgccattctggtgcaaattgagagtcagaccggggtggacaacgtcgaagcgatcgccgcgaccgagggcgttgatggcttgttcgtggggccgagcgacctggccgcagcattaggccatctgggtaatgccgcacatcctgacgtccagcgcgctatccagcatatcttcgccagcgcgaagaaacacggtaagcctagcggcattcttgcaccggtggaagccgatgcgcgccgctatctggagtggggcgcgaccttcgtcgccgtcggtagcgatttaggcgtcttccgttcagcaacccagaaacttgctgattcttttaaaaaataatcaccaggatgaagagagagaacattatgacaatcaaagtgggttttattggtcttggcatcatgggcaagccgatgagcaaaaatttgctgaaggcgggttattcgctggtggtatccgaccgtaaccccgaagccattgctgacgtgattgccgcgggcgcagagactgcgagcacggcgagggccattgctgagcagtgcgatgtaattatcaccatgctgccaaactctccgcacgtgaaagacgttgcgttgggtgaaaatggcattatcgaaggcgcgaaaccgggcaccgtggtgattgatatgagctccattgcgccgctggcgagtcgcgaaatcagcgaagcgctgaaggccaaaggcatcgatatgctggatgcgccggtgagcggcggcgaacccaaagcgatcgacggcaccctgtcggtgatggttggcggcgacaaggcgattttcgataaatactacgacctgatgaaagcgatggcgggatccgtggtgcataccggcgatattggcgcaggcaacgtcaccaagttggccaaccaggtgattgtggccctgaacatcgcggcaatgtcggaggcgttaaccctggccaccaaagccggcgttaacccggacctggtttatcaggcgattcgtggcggcctggcaggcagcaccgtgctcgatgctaaagcgccgatggtgatggatcgcaacttcaagccgggcttccgcatcgatctgcatattaaagatctggccaatgcgctggatacgtctcacggcgtcggcgcccagctaccgctgacggcggcggtgatggaaatgatgcaggcgctgcgcgcggatggtctggggaccgctgaccatagcgctctggcgtgttactacgaaaaactggcgaaagtggaagtaactcgttaacaacaagggcgtgttctcgcgccctgccattcttgccttgcgcggcacagtcaggcgacataactatgaaaatcgtaattgccccagactcttataaagaaagcctttctgccagcgaggtagctcaggcgatagaacaaggatttcgggaaattttccccgatgcgcaatatgtttcagttccgcttgccgacggcggcgaaggaacggttgaagccatgattgccgccacgcagggtacggcgcacacggcgctggtcaccgggccgctgggggataaagtgaatgcaaactggggcatgtccggggacggcacaaccgcatttattgagatggcggcggccagcgggctggcactggtgccgcctgaaaaacgtaatcctctgatcaccacttcacgcggaaccggcgagctgattttacaagcgctggagcacggcgcgaccagcattattatcggtattggcggcagcgcgaccaacgacggtggcgccggaatggtgcaggcgctgggcgcgaagctctgtgatgccaacggcagcgacatcggtaacggcggtggttcccttaattgcctgaataccattgatgtttcgtccatggacccacgtcttaaacactgtactattcgcgtagcttgcgacgtgacgaatccgttgattggcgagcagggggcatcgcgcgtttttggcccgcaaaaaggggcgaccgaagcgctcattgccgagctcgatagcaatcttgcccactacgcctcggttatcaaaaaatcgctgcgcgtggaggtgaaagatgtccccggcgccggagcggcgggggaatgggggcagcgctaatggcttttctgggggctgaactgcgcagcgggattgagattgtgacgacggcgctcaacctggaagaacatattcacgactgcacgctggtggtaaccggcgaagggcgactcgatagccagagcatcaacggcaaagtaccggttggcgtagccaatgtggcgaagaaataccataaaccggtgattgctattgccggcagtctgacccgcgatgtcggcgtggtacatcaatatggcatcgatgcggtgttcagcgtactgaccagtatcggctcgctggaagaggcattccgcggcgcattcgacaatatttatcgcgcttcgcgaaatattgccgcgacgctggcgatcggaatgcgttgtgcggggtgacaaaggcgcgcgaaccctctatacttcgcgccgaagctgaccagacagtcgccgcttcgtcgtcgtcctctttgggggagacgggcggaggggaggaaagtccgggctccatagggcaaggtgccaggtaacgcctgggggtgtcacagcccacgaccagtgcaacagagagcaaaccgccgatggcccgcgcaagcgggatcaggtaagggtgaaagggtgcggtaagagcgcaccgcgcggctggtaacagtccgcggcacggtaaactccacccggagcaaggccaaataggggttcataaggtacggcccgtactgaacccgggtaggctgcttgagccagtgagcgattgctggcctagatgaatgactgtccacgacagaacccggcttatcggtcagcttcactccttagaaaaccccgcctcggcggggtttttgctatctggaggatggaacaaagatgaatgactgtccacgacgctataccagaaagaaagcggcttatcggtcagtttcacctatttaatgtaaaaaccccgctccggcggggtttttactatctggaactcaatctcatttcgttcttttgtttttctatttcagcccattgcaagtctgtattgccggatatccacttttaaacagctttctggctgcattgcaggccgcgctcgttgatactgtcacgctttgaaaatgtatcttctatccattaatctcaatccctcatttgcagcggtcatcattcagcttaatggatagcaggttttacgtgttatccagacaggggcggtggacgtgaaaaatgtagtgttattccctcaactcaaaacggcaatagcatggctggttagccatggcgagacgattatgcagtttgcctggaatatcgtggcggcgctgattattctttttatcgggagaatgcttgcaaaagtcctcgccaaaaccttcgaaaaaattctgctgcgacgcaacgtagatgcgacaatcgtccacttcttcgccgcgctggtgcgctatatcaccatggcttttgcgattatcgccgcgttaggccgggtaggaattgaaacctcatccattatcgccgttattggcgcggcgggtctggccattggcctggcgctgcagggctcgctgtcaaattttgccgctggcgtattgttggtgacgttacgtcccttccgcgcgggtaactttgtgcaggtgggggcgatatccgggatggtgcaatcggtacatgttttttccaccacgctgcttactgtggataataaagaagtcattatcccgaacggtaaaattattgccgatagcatcgttaactactcccgccatccctatcgccgcatcgatcttacgctcggcgtagcgtgtcatagccaaatatcgcacgttaaacaggttatccagacgcttatcgatgatgaaaagcgcatcgatcattctcgcggtaccaccgttcgcctgatcgagttggctcccggttcgcttaattttaccattcgcgtatgggtgaaaaatgctgagtattgggacacctatttcgattttctggaaaatataaaaaatgcgctcgatgaaaataatattttgctggccgcgccgcgcatggatattaatttaacatcaccggatttagcacgtgttcaataagtaagaagaattttatattttatataattcatttggtgaatatattacctggatatttacactggtgaacatgcttttttacaaatcgtcattattgttcagtgaataatgggtcgtcttattactacgtacttattcaggataacaagatgaacaaactttctcggatggtattaatgacggctgtagccgcagggttctccatggcggcacaggccgctgaggttaccgccgcgccggcgccggctcaggatcctatcgttcagcatttaaaattgagccaggatcaggtcgcaaaaattaagagcctgcatcaggaaatggaaaagaacgtccagcagatttcacagaaagatattaaagatggtgtgttatttgacgtgatcgattccggtaagtggaatgaaaaagcggttaaagatcagctggcggcctttagcaaggttgagcagcaggtgcgctattatcgcgtgaagtactatttcggtgtaaatcaggtactgacgccggaacagcgtactcaggtgaaaaaagatctctctcaggcattgagcgagtaataaagtcggccccgctatggggccgatttgttcaggcggcgttatcttcgtcctgcaaccgcgtttgcgcatcttccacgatggcttccagttcactcagcatctcttcatagccaaagccgattgggctcatggtttccacagcgactggctggtctaacgattttgcctttttgctctttttcttgctcactcacaaactcccgggcttccttgttacaccggtaaatctatcagcaaagcgcgcagcggcgtatcggcgacgagggtaatgttagcttcgtcacgaataaacgcgccatcgccgcaggttaatgcctgtttctcttccttttttgccacggcatgtaccgtgccgtgaatcgactgcagataggcgcgcgggccgtgcagttgaacgttaatctcttcgcccttcgccagctgcagatgatggatccacacctgctggcgcagctgtaaactgtcgccgctgccgtctggtgaggctaatagctgaatcggcgaatcgccaacagtcattttctgtaccagcgggttttcgcgctcagggcaggcatccagccacagctgcatgcgcgtcaacgactgctctttattgagattatgctcgctgtagctgacccccggttgggtggagagcagcagggcttcgccagcttttgcctgtatgtggttgccgtcgctatcgcggtattccgcttccccttccagaatcagattcaggatatcgacctttgggtaggttcgtggctgaaatgacgcgcccggcgccagcacttcttgattgagtacgcgcagcgaggcgtaacccagcaatttagggtcgaagtagtggccaaaggaaaaggtgtagcgggcctgcagccagccgaagtctgcttgaccgcattgtttggctgttcgggttgtaatcattttcttgacctctctttacactaaatcaatggtaaaggtatggacgctgtattgttagccagatattctgcccggtatgttcaaaattcctgaatgagagcgaaatggcgaaagagagagcactaacgctggaagcgttacgcgtaatggatgcgatagaccgacgcgggagctttgccgctgcggctgacgagttgggtcgcgtgccttcggccctaagctacaccatgcaaaaactggaagaagaactggatgtggtgttgtttgaccgttccggccatcgcacaaaatttacgaacgttggacgcatgctgctggaacgcgggcgcgtgctgctggaagcggcggacaagctgaccaccgatgccgaagcgctgtcgcgcggctgggaaactcacctgaccatcgttaccgaagccttggttccgaccaccgatctgtttccgctaattgagaaactggcgaccaaatccaatacccagctgtcgattattaccgaagtactggccggtgcctgggaacggctggagcaggggcgtgctgatattgtcgtcgcgccggatatgcattttcgttcatcgtcagaaattaactcgcgtaagctctattcggtgttaagcgtttacgttgccgcgccggatcacccgattcatcaggagccagaaccgctttctgaggtgacgcgggtgaaatatcgcggcgtcgcggtggcggataccgcgcgcgagcgtccggttctgacggtacaactgctggataagcagccgcgcttaaccgtcagcactattgaagataaacgccaggcgctgctggcggggcttggcgtggcgacgatgccgtacccgttggttgagaaggatattgccgaagggcgcttgcgggttgtaagccctgaatataccaacgaaatcgatatcattatggcctggcgccgtgacagcatgggcgaagccaaatcctggtgtctgcgggagatcccgaaactgtttgccggcagataacgggaagatgcgctcctcagcccgaggagcgcataaatcagtaggagtagggttttggatttggcccaaagcgattgttgccgggcgtgccgttctggcaattgaaaatcaaaatcaccagccagccgatgaccgggatcagcagcagcagtagccaccacgccgagcggtcggtgtcatgcaggcgacgaaactgtaccgcccaccagggtaaaaaaaccagcacgccgtaaatggtcgtcaggatgccttcaccccctgcacgctgccagccgagcatcttatcgatgatgcttaaaactgcggtgagaatgatgttgaccagaataaacatccagtactctttgcgccgggcgcggccgccaaagccaatatagtttcgtaatacttttagataccagtccattttctcacgccttagttaatcattaatcacttgtttttaaagcgatcaaaataatcataggcgtgaatatcaaactggtaaatatctgttatccgaatataaggcgcctttcggcgccttatcgatcagcgggaaaagcgatcccgcccgtgcggttcgttgagatcctgctgcggaccaacggagatgatccccgtcgggttgatggttttgtggctgcgataatagtgattacggatatgcgggaaattcaccgtttccgcaatgcccggcatctggtagatatcgcgcaggaaaccgtacaggttgagatagtcgctgatgcggcgcttatcgcatttaaagtgggtaacatacaccggatcgaaacggaccagcgtcgtccacaggcggatatctgcttccgttaactggttcccggtcaggtagcggtgctgaccgaggatctgctcaaggcgttcgagcgaggtaaacagcgcatcaacggcttcgtcgtaggcctgctggctggtggcgaaaccggctttatataccccgttgttaacgttgtcgtagatccagctattcagatcgtcgatcttttctcgcaacgccggcggataatagtcgcccgcgcgcgcgcccaggccatcaaacgcggtattgaacatgcggataatttcagccgactcattgctgacgatggtctgttgttttttatcccacagcaccggaacggtcacccggccggtgtaatgcggatcggcctgcagataaagctgatagaggaactgatgatgatagagctggtcgccggtagcatccgggaaatcgtcggcgaaggtccagccattttccagcatcagtggattcaccactgagacggatataaagggctctaatcctttcaacttgcgcagaatcagggtgcgatgggcccacggacaggccagtgaaacgtacagatgatagcggtctttctctgcggcgaagccaccttcgcccgcaggtcctggcgcgccatcggcggtaagccagttgcggaaggctgaaacggaacgcttgaaccgtcctccggtggatttggtgtcataccaggtatcttgccagacgccgtcgactaattgtcccattacttcctccttcagatagcaaaagcgaggagatagcccctcgcttttttagatttttactcagtatagtgtgcttaccactttttattcagcacgcggtcgatgctgaatgcgcccggacccgtcacggccagcagcagataaccaccagcgatagtcaggtttttcatgaacatcagtgagttcacgccttcagcaaagttgctgtggaacaggaacgcagtcagcagggtaaagcctgcagtgaacagcgcagtagtgcgagtcaggaaaccgaacagaatcgccagaccgccgccaaactcaagcagaatagtcagcggcagcagcgctcccggaacacccattgcttccatatactgctgcgtacctgcatacccggtgatttttccccaaccagcggtaatgaacagaatcggcatcagaatacgcgctaccagtacaccaacatcttctaattttttcatttcttactccagaaaacccaaagggcggcgatttcgttttttagagcaatcctgcgtgattacgcgggcttgctgtcgatggagaggatattagcgagcttgagaggggattgttagcaaggaaaactgtagttctttttcaaactttctgagcaattggtgcgatcggtgaaaatattttccgaggcgcctcgcagcgtgcgtggctatcagttgtggtggcggggataaaagaggatatctgtcgccaacttatttttgcatagacaggatgtcatgaaacaattcagatctacgcctcacgatgcgttgtttaaaacatttctcactcatccggaaacggcgcgagattttctccagatccatctaccggaatcgttacgtatgcaatgcgatctcagtaccctgcagttagagtccggcagctttattgaggacgatttgcgtgcgttgtactcggatgtgttgtggtcaattaaaacgcaaagcggaagcggatatgtgtacgcgctgattgaacaccaaagcacgccagacaaacatatgacctttagactaatgcgctatgcatttgccataatggctcgtcatctggatgccggtaatgaacatctgccattggttattccgatgttgttttatcatgggcggattacaccttatcccttttcgatgtgctggctggatagttttgcgcaacccgcgttagcacgggagatatatggggataattttccgttgatcgatgtgacatccttcacggacgatgaaatccaacagcatcggcgtatagcaattttggagttcctgcagaaaaatattcgccagcgcgatctgaatgacctggtagatcaacttgtagccttgctgctgccgggttataccaccgagcatcaatttaacgtgttgatgaactacattgcccgttccggccagttgaccagccctggcagattttttcgtcaactggcgcagggaatgcctgaacataaggagcaactgatgacattagcagaatggtttgaagagcgtgggcgcacaaagggaagaaaacagggtcgtgaagaggggcgtgaagaaggtagagaagaaggcgaacgtcaggcgacgcgtaaaatagccctcgcgatgcttcgtaacggcgttgatagcgcgctggtcagtaaaaccaccggtttaagcgaacaagagctcagcgcgctggcgcactgagcgagcaattaacgcgatgcggactggcgcagaatccctttgaccatccgccatgtgctccagatgccgaggccgcgtttgccccagcggattaaaaagcgcggatggcgtactgaccagatagccatcaccccgctgccgaccatcgcccatgaacgcagatgtttcagcgtttgccagccgcgatcgataggcgaggtggcttccagccagtgacgatgactggcagccaaatccagccgctgttgctggatttggcgcagcagcagcgcttttcgctggttgcgttcctgttggtcgctcatcgacgatcgtcctcaagcagcgcacgatcgttcgccagttcgtcgcgggtgtgacgtaaaaatgttgagcggcgagctttcctgagggtccagattccccctataagtgaggcgagtaacaggacgctggtggtcgcgatcatcacatgcaggcggtactgtggatcgacggcccagatgatcagcaccagcaggctcatcagcccaaaagcggcgaatagcagcgttaacccgagcatcagcaacagctgaaagaggttcgctttctcctcttccagctccacgacgaccaggcgcaagcgcgtttccaccatttcgaccagcagcgtgatgatccgctggccgatgccgaatacgctttgtcctgggccctgcgtgtgttgagagtttgccataattaacggcgcgacagcagtacgccgaccaccagtccgacggctgcgccaatgcccacgccggtccacggattttcgcgcacgtactcatcggcgcgagcggcggtttcacgcgtctgcttgacgatggcatcgctggtgtcgctgagacgcacacggctgtctttcagcacgctttccgctttgctacgcagtttgccgagttcttctttcgatttatcggttgaggagttcagaacttcttccagcgtgtcagccagatttttcagctcagcgcgtagatcttctgcaacgttatctttagccatcttgttctcctgtagcgtttaccaattaataatcgcgtgactcaagcgctttcagttcttgctgcgcttcatccagtttgcgttcccgtttgctaattttgtctgcatcgcctttctgcttcgcctcgctcagatcgcgctgacgttcggcaacttcggccttctgtttagcgattttctgctgatgttcagccctgaccttactgtcgctgcagttagcgcgaacttcctgcagcgctttgttcaggccgtcaatgcgatgctgattatggtgtttttcggcatagctgatctcccgttggatactctgttctttttcctgacaaggagaggctgcgaaggcgctggcgctaagtgaggtcagagccagtaatagtgcgatgcggtatttcatggattctaccttccattgtgtgaggggatatcggtgatatacccaatccagtcaacaatacgagccaggcggttcccgcagtcttaataatagacacgaaagcgggacatcaccaaaccgtacgaaaagattcggaatttttgacgcgttatccaaaacggcgcggagcatcgcgcaggcgggataaccaggcggttgcagaattttcttcatccaccagagcaataatataaccgtgaggcagagctcggcccaatacttcttttgccgcggcgccctgggcgttggagtcgaatttgatcagcaggccgtctttttgcggcgtgatgctcttaaaacggatgccgttggcgtcaagatgatgccagacggaaaaaccgtccggcatagcgacgccctggctgacgggacggatggccagagtggactcatgctgactgacggtcagccacagccagacgatggcgcaaagcagcagtgagccgcccagcatccaccgcagctggcgccaggaaggacgtttgatgaccatgctcagctccgactgctgtgttttttcttccacagtacaaccagggagccgatcagaccgaagaccagcagcgcaaccggcagcagcatcaggcacgacatcagctgatcttcatacttcaggaataccggtgttttacccagcagatagccgagagaggtcaggatcaacacccacagcagaccgctcatccagttaaagaactggaaacgcgcgttattcagaccggagataccggcaatcgttggcagtagggtacgtacgaaggcgataaagcggccaattagcagcgctgataacccgtgcttatggaacaggtgatgggctcgctggtgataatgcgacggtaaatgcgatagccagttttgcacgatccgcgtattgcccagccagcgtccctggatgtagctcacccagcagccgaggctggccgccgccgtcagaagcagtaaggtttccggaaagcccatcgccctttggcgatcaaaacgcctaccagcaccagcaggctatcacccggtaaaaacgccgctggcagcaaaccgttctcaaggaacaaaatcataaataagacaaaatagagcatgccaatcatggagggattagcgagcgtttcgtaatcctgggcccataaggcattcagtaattgggttagtagttccattcacgattcctggtacatcggttaacggtacgtcttatacatagcgactagattattttttagagtatggtcgctgttgagacgttctgatcgaatccttgattaaacagtaagtaaacacttacatgcagaacggcaaaatgcatctaattgtaacaaactagctgactttccgtcatagaaattgcagtttgttgctgattgattttgcgggttgcggggacgagtagcgagaggatttacacaggctgacactatatatgctttgcttaccctgtcgggtttgcgggcagaaaaagaggttctgcccgtgaaagggataatacgttattttgccccgttcgccgcggtatcgagatgaaccaccggattttcagcaaacaaatagcgatcggcattgaattcaaagtcatcgctggtttcgttaaacagcatcagcttggtattctccagatgctgccacatcgccagcttcgccgcgtgagggtctttacgaattagcgctttgaggatttcgtcatgatcgtcacaccagttgtcgacggtgcgcaggtcgatatggtcgtgcagttttttccagtacgggttgtgtacccgctgggtccacattttttcaacgatggcggcaagggcggtgttctgggtagccaacgcgacctgaacatggaactgcaggtcccattcggaatcacggaagcacttctcgttgcgggctttctcctgaatttccatcagcttcatgatgtcctgcttggtcacctgagtcgcggcgaattcagcgatattgctctcaatcaactgacgggcctggagtaattcaaacggaccatagttggcgaactccagcgattcatccaccacctgttggtatttcgggtggttggaaataacgtggatgccggagcctttgcggacttcaacatagccttcgacttccagcatgatgatggcttcgcgaaccacggtgcggctgacgcttttttcatcggcgatgaagcgctctgctggcagcttatccctacaaggtaaacgccttgttcgatacgcgtctttagctcagcggcaagctgctgatagagacggcgcggttcactgatttccatattcgctcccggaagatggcgacaatattcgatttgttataccacttttacgcgctttccaccactgaaaggcacaaaaaaagccgccttaaaaggcggcttagtcggtgcaaaatcatcttgcagtctagctttgcgtcaccggtttactggtattgagcggcgtcgagtcatcgccggccgatttgtttttcagcaccgtccagataaccagcgcgcccagcaggtcaaagaccgccagcaccgcgaacagcgggctgaagccgatggtatccgccagcgcgccgacgaccagcgcgaacatggtgctcgccagccatgccgccatcccggtcagaccgttggcggtcgccacttcgttacgaccaaagacgtcggaagagagggtgatcagcgcacccgacaaggcctggtgagcaaaaccgccgacgcacagcagcgcaatcgccacataggggctggtgaacaggccaatcatgccaggaccaatcatcagcagggcgcccatcgtcacgaccattttacgtgagacgataagattcacgccaaaccagcgctggaacagcggcggcaggtagccgccaacgatgcagccgaggtcggcgaacagcatcggcatccaggcgaacatggcgatctctttcaggttaaagccgtaaaccttaaacatgaacagcgggatccaggcgttgaaggtaccccaggctggttctgcgaggaagcgcggcagcgcaataccccagaactgacggttacgcaggatctgccacggcgacattttcttcgcgttattggtctgatgctgagattcctggccgccgatgatgtagtcacgttcttcatcggtgagttttttctgatcgcgcgggtgtttgtagaaaatcagccaagccattgcccaggcgaagctcagtaccccggaaataataaatgccatctgccagctatgcatgacaatcgcccataccaccagcggcggagctatcatcgcgccgatagaagagccgacgttgaaatagccgacggcgatggaacgctctttcgccgggaaccattcggagctggctttcagaccggcagggatcattgccgcttccgctgcgccgaccgcgccgcgggccagcgccagcccgccccagctacctgccagcgccgttgaaccgcagaataccgcccaggcgatagcaaagaaggcgtagccaattttggtgccaagcacatcgagcacatagccggcaaccggctgcataacggtatatgcagcggagtaggcggcgatgatataagaatattgttgggttgaaatgtgcaactcttccatcagcgtcggcgcagccgccgctacggtgttacgagtcaggtaacccagcacggtgcccagcgtcaccagtgcgatcatataccaacgtaaccctttaattttacgcatgtaaaacctcatcgttgttgtctctccgcagcgtctgcggccaactttcgtcccgccaggggaggaaagatggggaaacggagggttcaggacgtgaactgaaccttgccatcagtggttaaagtgaaaccggcatccctaccgtttaagccgatgttattcacaccggtaatgcattccgtcggtttatatgttgcgacggcagaaagataacttgtcatacaactttaaaagttgagtactgtcacaaaagtgggaaagtttgtagggacattaatcgcgtcaattaaagccaggtctggcgcggcttgcagcgatgtttactcctttggtggtgctttttttgtcgacgtttattgatctaactcacgaaaaatacttcggcctgtagaaattggtgtgataactttgtcagcattagagtcaatcatctgatgggctccttgatggggcgaagaggacacgacaatgacaccgtttatgaccgaagattttctgcttgataccgagtttgcccgccgtctgtaccacgattacgccaaagatcagccgattttcgactaccactgccaccttccgccgcagcaggttgccgaaaattaccgttttaaaaatctgtatgacatctggctgaaaggcgaccattacaaatggcgcgcgatgcgtaccaacggcgtggcggagcgcctgtgtaccggcgatgcttccgatcgcgagaaatttgacgcctgggcggcaaccgttcctcataccatcggtaacccgctataccactggacgcatttagagctgcgccgtccttttggtattacaggtaagttgttgtcgccagccacggcggatgaaatctgggaccagtgtaatgagttgctggctcaggagtcgttctccgcccgtggaatcatgaagcagatgaatgtgaagatggtggggacgaccgacgatccgattgattcactggagcaccatgcggcggtcgctaaagatagtacttttgatatcaaggtattgccgagctggcgcccggataaagcgttcaacatcgagcaagccacttttaacgattacatgagcaagcttggcgaagtctccgataccgagattcgccgttttgccgatctgcaaagcgcgctgactaagcgtctggatcactttgccgctcacggctgtaaagtttccgaccacgcgctggacgtggtgctgttcgctgaagctagcgataacgaactggatagcattctggcgcgccgtctggcgggcgaaacgctcagcgagcatgaagtcgcgcagttcaaaacggcggtgctggtattcctcggtgcggaatacgcgcgtcgcggctgggtacagcagtaccatatcggcgcgctgcgtaataacaacctgcgtcagttcaaactgttagggccggatgttggcttcgactccatcaacgatcgtccgatggccgaagagttatcgaagctgctgagcaagcagaacgaagagaacctgctgccgaaaaccattctgtactgcctgaacccacgcgataacgaagtactgggcaccatgatcggtaacttccagggagaaggcatgccgggcaagatgcagttcggttccggctggtggttcaacgatcagaaagacggcatggaacgtcagatgacccaactggcgcagcttggcctgctgagccgctttgtcggcatgctgaccgacagccgcagcttcctctcctacacccgccacgaatacttccgccgtattctgtgccagatgatcggccgctgggtggctgctggcgaagcgcctgcggatatcgcgctgctgggtgagatggtgaaaaacatctgctttaacaatgcgcgtgattacttcgccattgaattgaactaaggccagaggtcggttgatatgcaatacataaaaatccattcgcaggataacgtcgcggtggcgctggcggatatggcgtcaggaaccgtggtgacgattgataacgataccgtcacccttagccaggatgttgtccgtggtcataagttcgcgctgcgggccattgcgaaaggtgaaaacgtcattaagtacgggttgccgattggtcatgcgctggcggatatcgcgccgggcgagcatgttcatgcgcacaatacgcgtaccaatctgagcgatcttgacgcgtatcgctatcaacctgacctggttgaacaaccggcgcaacctgcggatcgcgacgtcgagatttatcgtcgcgccagcggtgaagtcggcgtgcgtaacgaattatggatcctgccgaccgtgggctgtgttaacggtatcgcccggcagatccagaaccgtttcctgaaagagaccaacgacgcggaaggcacggacggtgtcttccttttcagccacacctacggctgctcgcagttgggagatgaccacatcaacacccgtaccatgctgcaaaacatggtccgccacccgaatgccggggcggtgctggtgattggtcttggctgcgagaacaaccaggttgatgccttccgtgagacgctgggggattttgacccggaacgcgtgcacttcatgatttgccagcatcaggaagatgaagtggaagcgggaattgagcatcttcatcaactctatgcagtgatgcgccatgataaacgcgaagcgggtaaattgagcgaactgaagtttggccttgagtgtggcggctcggacggcctgtccggcattaccgctaacccaatgctggggcgtttttctgactacctgattgcgaacggcggcaccacggtgctgaccgaagtgccggaaatgttcggtgctgagcaactactgatgagccactgtcgcgacgaagagaccttcggcaaactggtcaccatggtcaatgattttaaacagtattttatcgctcatgaccagcctatttatgagaacccgtcgccgggcaacaaagctggcggtatcacgacgctggaagataagtctcttggctgcacgcagaaagcgggttccagccaggtggtggatgttctgcgctacggtgaacgtttgaaagtccacgggttgaatctgttgagcgcgccgggtaacgatgcggtggcgaccagcgcgctggcgggcgccggctgccatatggtgctgttcagtaccggccgtggcaccccttatggtggtttcgtaccgacggtaaaaatcgctactaacagcgagctggcggcgaagaaaaagcactggattgatttcgatgccgggcagttgattcacgggaacgcgatgccgcaggtgctggaggagtttgtcgatctgatcgttgatatcgccaatggcaagcagacctgcaacgaacgcaatgatttccgcgaactggcaatctttaaaagcggcgtcacgctgtaacgacggtgactaccgctgtgttttaaagtcggataagcgtagcgccatccgacaatacgctaactacgcagggcgttcttcgccagctgttcgtcttcggccatacaggccgcagcggtaaacagcgcatcggtcgatgagttgagcgccgtttcgcaggagtcctgtagcacgccgataataaagccgacggcgacgacctgcatggcgacatcgttcggaataccgaacatgttacaggccagcgggatcagcagcagcgaaccacccgccaccccagaagcgccgcaggcgcacagcgaggccactacgctcagcagcagcgccgtcggtagatccaccggaatattcaacgtatgtaccgccgccagcgtcagcacggtgatagtaatcgccgcgcccgccatattgatggtcgcccccagcggaatagataccgaataggtatcgcgatccagattcagcttctcgcacagcgccatattcaccggaatgttggcggcggagctgcgggtaaagaaggcgtagacgccgctttcacgcaggcaggtcagcaccagcggatacgggttacggcggattttccagaataccagcagcgggttaataaccagcgccaccagcagcatgcagccgaccaacaccagcagcaactgggcgtagccccacagggtatcgaaaccagtcgtcgccagcgttgaggagaccaggccaaaaatacccagcggcgcaaagcggatcaccagcttgacgataaaggtcaccgcgtgcgagacgtcgttaatcagatttttagtgctgtcgttaccatggcgcagcgcgaagcccagccccacagcccacaccagaataccgatatagttggcgttcagcagcgcgtcgatagggttagccaccatgctcatcagcagcccgcgtagcacctctacaattcccgacggcggggtgatgctgtccgccgcgctggtcagatgcagggtggaagggaaaacaaagctaaacagcaccgcggtgagcgccgcgctgaaggtacccagcagatagagaaacagaatcgggcggatactggttttttgtccgtgctgatggttggcgattgaggccatgaccaacattaacaccagcaccggtgcgacggctttcagcgcgccgacgaacagcgttcccagcagtcccacggcgatggcggccggtttcgagaccagcgccagtatcacgccaagtaccagtcccaacaggatttgttttaccagactgccctgcgccaggcgttgcagcagccccgacgggcgggtttgtgttgtcataaatcattccttccagtgatgtagcagttcatcccggcgacgtattatttgttacgtttatgtccggatgtaaatgaatgtttgcatggtcgagtatacggaaagaacgcgagggaggaagcgtattctactgtttcttacacgccgatcttgttttttaactatatattaacttttttgtgacatagataaagattatgcgcgggaaggctgaagcagtgaagcgtatcccggccagatacgcgatatctggccgggagcaggggttattgcagctgtttcttcttatcgttctgtttgttcacccaggcgttaatcagcagcgtcgccgccagaataccgcccaccacgccgagggaaacggcgatcggaatgtggtagaaatcgacgattagcatcttgataccgataaacaccaggatcaccgacagaccatatttcagcatcgagaagcgttcggcgacgcccgccaacaggaagtacatcgcacgaaggccgagaatcgcaaacaggttagaggtcagcacgataaacgggtcggtggtcaccgcgaaaatcgccgggatgctatcaacggcgaaaatcacgtcgctcagctcaaccaggatcagcaccagaagcagcggcgtggcgaacagtacgccatttttacgggtgaagaagcgctcgctctcgattttatccgtcatccgcagatggctgcggatccaacgcaccagcggcttatcgccgatcccggaatcatcttctttcgccagcgccattttcaccccggtaaacagcaggaacgcgccgaacacgtacagtagccattcgaactgcgaaatcagccagctgccggtgaagatcataatggtacgcaggacaatcgccccgaggacgccatacaccagtacccggcgctgtagcgctggcggcacggcaaagtagctaaagagcattagccagacgaagacgttatcgaccgccagtgatttttcgatcagataaccggtgaggaaggctaacgcctgcggatcggcgacggcgcggccctgcgtttgcaccaaataccaccagaaagcggcgttaaacagcagggagagggtgacccacaggatggaccaaccggcggcctgcttcatggtcatggtatgcgcaccgcgccttccctgaagcagtaaatcgatcgccagcatgatgaccacgactacagcgaatccgccccataacaacggcgtgccgacactattcattgcgttattccttacataaaaacaaaacggctgtcgtcggaagacggcagccgctgcgcttttatgcatagacctcgccttccggcaaggtctcacttacaacaagagcggacatggatccttggtcttgttgcccggcgaccggatgcggttttgcacgcatcgtaatgacgatcgaccggccaggaagttactcccctttgcacgtaacaaagtattacaagttataaagggcgtcaatggaggtcgagggcccatttacactcctttacgccacaggctgagtatccgcagggaagaccacgccggtctggcgacggatttcactaagcagttttgccgtaatgcggctgagctcaagcccgggatgatcgacgtcgttggcttcaaccagccgcgcgaacgcttccgcttcatacagcatagtattgatgtgctgaggctgagtgagatcctgcgcttttccgccgcgtggaataaaggctaccttctggcattcggagattttctcaatcaccagcgcgccttcttcaccctggatttcgctgggatagtggagtcgctgaccttcgagtggtgcagggtgacatcgaaatcgccgtagctcagcactaccgtgccctggccatcaacgccgcttgccagcaggctggcgctggcatggaccgcttgcggttcgccccacagcgcgaccgccgaggcgaggcagtaaaaaccgatatccataatcgagccattggaaaaaaccgggttgaaggtatttggattttcgccgtcgagatagcgctggtaacgcgaagagtactgacagtagttgatgaaggctttacgcaatttgcccactttatcgagcgcttcacgcagcagcaggaagttgggcaggctggcggttttgaaggcttcaaacagcaccacgttgttttctttagccacggcaatcgccgcttcgacttcctggaggttcgatgccagcggcttttcgcaaatcacgtgctttttatggctcaggaacaggcgggtttgcgggaagtgtagcgagttcgggctggcaatatagaccgcgtcaacgtcagggctctgcgctagctcatcgagcgaggtaaacagatgctcgaccgggtagtcattagcgaaagcttgcgcctgttcaaggctgcgggaataaatcgcggtgagtttaaatttaccggtttcatgggcggcatcgacaaactgcttagtaatccagtttgtgccaacaactgcgaaacgtatcataaacgttgacgaactccgttaaagggacctttcgtcactctagcacgccatgatgacaaaacgagtgcgctatcacgcagaacggtttaacgaaaggtgcgtcagccacaggcgggtatcgaactctaactggtgatactgcggctccatatgacagcacagctgatagaaggccttattgtgatccttctcttttaagtgcgccagttcatgaaccacgatcatgcgtagaaacgcttccggcgcgtcgcgaaacaccgtcgccacgcgaatttccgctttagctttcagtttgccgccctgaacgcgggaaatggcggtatgcaggccaagcgcgttcttcagcacgtggattttactgtcgtacatcaccttattgattggcgccgcccgcgcagatagcgggccttcagatcctgggtgtattgatataacgccttatcgctgttgacatcatgtccctgcggatagcgcttttgcagcacctcgccgagacggtcttgctcgattaaggtcgtcacctgcgacagcagcgattcagggtagccctgaaggtaaggtagcgtgttcatggtgaaaaaagtttacttctccggagaattgagcgataacacgcgcgaattttagcatttcggaggggcgatgagccaggtagagttaaacggtgagttattcacattagagcggttcccacctaacgctgaagaagaagcgcttcaggcatgggaagcggcggatgaatatctgctgcaacaggtgaatgacgtcgacggcctgacgctcatcttcaacgacggcttcggcgcgctctcctgcgcgctggcggagcgcaacccggtcagcatcaacgactcctttatttccgagctggcgactcgccacaacctgcggatgaacggtatcgatgaagagagcgtgcgctttcaggatagcctgagcccgctgccggccgcgccggctctggtgctgattaaggtgccaaaacagctggcgctgctggaacagcagctgcgcgcgctgcgcgaagtggtaacgccggaaacccgcattatcgccgcggcgaaagcccgagatgtgcacaactcgacgctggcgctgtttgaaaaaatcctcggcactaccaccacctcgctggcgtggaaaaaagcgcgtctgatccactgcgttttcaccgcccctaaacttgccgatgcgccgcaaacctacagctggaagctggacggcacgccatggaccatccataaccacgccaacgtttttgcccgcagcggcctggacatcggcgcgcgtttcttccttcagcacttaccgtctgatttagaaggcgagatcgccgatctcggctgcggcaatggggtgattggcctgcaggcgctggcgcaaaatccaaacgccagcgtgatgttcaccgatgagtcgcacatggcggtggcttccagccgtttgaacgtcgagcgcaacctgccggacgatatcgcacgctgtgaatttatggtcaacaactcgctctccggcattgagcccgaccggtttacggcgattctgtgtaatccgccgttccatcagcagcacgctattaccgaccatatcgcctggcagatgtttaacgatgcccgccgcagcctgaaatatggcggcgagctgtacgtcgtcggcaaccgccacctcgattacttccgtaagctgaagcgcgcttttggtaactgcacgacgattgcgacgaacaataagtttgtcattttgaaagcaacgaaggtgcgtaaacagcgctgattcttgttgttgtctcctgtagatactgttatcggtttgcaacggttttggtccgggaaaaacagttgttttttattatttcagagcagattgcgctcccgatatttcttctgcgttatgtctctcatggcgcaggagcgtacaggggcggccagtcgccgccgcccctgtaccccgggctctggccgccaaaatcgccacttcgtggtaccttcgacttatccctgcaggctccgggtcgggccgaggcagcgtccgtgcaaaacacggccctcagcccgcatccatgcgggctgccccggccttccgggaacgtctcagcgattttgaggccaccagcactggtagtttcagccagcgtggtgaagacatcaaaggcaggtcgcaaggaccgtaggtcgggtaaggcgttagccgccacccgacaaaaaaacgacaccgcgggtagcccggggaaggcgcatcgcgccgccgccgggacacggctaaatcgccagcgccagtttagtgccctgggcaatcgcccgacgcgcatccagctccgccgccacgtcgcaaccgccgattaaatgcaccgtttttcccgccgcgcgcagcggttccgccagctcgcgacgcggttcctgaccggcgcagatcaccacctgatcgaccgccaacagttggcgctcgccgccgatagtgacgtgtaatccttcatcatcgatcttttcataactgaccgccgggatcattttcacgccgcgcgccagcagcgtcgcgcggtggatccaaccggtggttttgccgagcccttcgcccggtttgctggctttgcgctgcagcatcacaatctgtcgcgggcttttactcagctgtgggccctcaggactcagccctcccgccgtttgcaggctggtatcgataccccattcgcggcagaactcgccgatatcctggctggtggccacgcccgactggcttaaatacatggcggtatcgaagccgatgccgccgcagccgataatcgccaccttcgcgccaaccggcgctttatcacgcaagacattaaggtagctcagcactttaggatgatcgatcccgtcgatcgccggcaggcgtggggcgatgccggtggcgaggatcgtctcatcgaacgccaacagatcgtctgtcgtgacgcgggtgttcaggcgtagatcgacaccatgaagatcgagcatggtgcggtagtaacgcaacgtctcgtgaaactcctctttgccggggatctgtttggcgatattaaactggccgccgatctccgggagcgcatcgaacaacgtgacatgatgaccgcgggcggcggcgttaacggagaaggccagaccggccggcccggcgccgaccaccgccagccgtttaggcgcgttggcaggcaggaccggcatcagggtttcatgacaggcgcgcgggttgaccagacaggaggtgactttgccgacgaagatccgatcgagacacgcctggttgcaaccgatgcaggtattgatctccccggcgcgatcgcgctgcgctttcgacataaattcggcgtcggcgaggaacgggcgggccatcgataccatatcggcatcgccgcgtgcgagaatatcctccgcgacctgcggatcgttgatgcggttggtggtgatcaacgggatcgacaccgcgcccttcagcttgcgggtgacccagctgaaagctccgcgcggtaccggcgtggcgatggtcggaatgcgcgcttcgtgccagccaatcccggtgttgataattgtcgctcccgccgcttcaatcgctttggccagttcggtgacttccgccagcgtgctgccgtcgttgaccagatcgagcatcgacagacggtagatgataatgaaatcgtgaccggcgcgctggcgtaccgccttaaccacctctacggcgaaacgcatgcgcctgacataatcgccgccccattggtcgtcgcgctggttggtgcgcgcggcgagaaattcgttaatcagatagccttctgaacccatcacttcgacgccgtcatatcccgcttcacgcgccagttgggcgcagtgggcaaaatcatcgatcagcttcaggatctcatcgtggctcagttcatggggtgtaaaacggttaatcggcgcctgtagcgccgaaggggccaccagcgcgggctggtagctgtagcgcccggtgtgcaggatctgcagggcgattttgccgccttcctgatgtaccgcgtcggtaatatggcgatggtgcgccagatggctggcatcgttgagtaccgcgccgccggccatggtgacgccagagggcgccggagcgatgccgccggtgacgatcagcgccacgccgtgacgggcgcgttcggcgtaaaaggccgccagccgctgcgcgccgtccggcagctcttccagcccggtgtgcatcgagcccatcaacacgcggtttttgagcgttgtgaagcccagctcaagcggggcgaaaagcgacggatagcggctcatagtggcttccaatgtaaaattattgttatgtggtcggatgagttactaatttagccgtcgcggagaaaaagggaaaaggggagtgcggtgattgtgatgggattcaaagaacggaactcgttgtccctcaccccggccctctcccaaagggagaggggaaaggcggatcggcaccggtggttagggtgagggggaagacgcaacgcgctggcggcgctccagacccggcgcctgccacatcgacgttgtcagcccgctatcgacaaggccaagctgatcggcgtacaccgtctgccacttgctcatcatctcctgatacagctcgcgatgctgcggatttggggtgaactcgcggtgccagctcaccaaccgttctcctgtactggccatatcgccatacagtccggcgccggttccggcggcgatggcgcagcccagagcggtggcttcgcggaccaccggcacccgcaccggcaggccggtgacgtcgctgaggatctggctccacagcgcgcctttagagccgccgccggcaaacaccaggctctcgaatgtcaccccggagaactgggagatctgcgcgaggttgcaggcggagacaatcgctgcgttctcttccagcgcgcggaacagggtcgctttgttgcacttctccggatcgatggagaggttaataaacgacggcgcggcgtggtaccactgcttaaagtgcatggcgtcggaaaaaataggcatcacgccgtgggaaccggcgggtacgcggctggccatctcctccagcagcgaataggcatcaacgccgagccgctcggcaatcagtttttcttcagcgcagaaggcgtcgcgaaaccagcgcatggtcaggccggtaaagaaactgatcgattccgcctgcgccatgccgggaatgacatgaggattaacgcgaatattcatctgcggatcggtacgcacctgcggcaggttgaccacctgctgccagaatgtgccaccgagtaccgcggtttgcccggcgcgcaccaccccaaggcccaggcagccgagctggacgtcgccgccgcccatcactaccggcgtcccggcgcgcaggccgctctcatgcgccgccgcttcggtgacggcgcccagcagggtaccggtctctttgaccggcgacagcatatcggcgcgcagcccggccatatccagcagcgccggacgccagtcgcggctgaacaggtcgagcatgccggtggtgccggcgtttgacgggtcgaccgccagctcgccggatagcttcgccgccagccagtcgctgatcatggtgatggttgccgctttgcggtagatatcggggcggtggtgcgccagccacagcaggcgcggcatggcgctaagcgccagggtttgtcccgagacctcgtatacctcggattcaaaacgatagtcgtggatctccttaagctccgccacttcgcggctggcgcgggcatcgacgttggcgcaggcccagatggcctcgccgtcgcggtcatagaggacgatcccttcgcgcatcgaacagcaggcgacggattgaatgtcggcggcagagagccgggcggcctcgagcgcctggcgaatgcactggcaggccagctgccagttggtggtaaggtcgaactccatcgagccggggacgttatcgacgctcaggtgtttccattcggcctggcctaccgccagctggcggccattaagatcgaaaatgaccgcccgaatgctgccggtcccggcatctaacgctaacaggtaactcatgacatgcgcctcgctgttgtcgcgcggcgccaggccgtcaggaggccagcgagagcaccgcgcgtgctgttgtctcttccgttaccaggccattaatgcgcttgccaatcagagcggcatgaatcgcctgcgctttttgttctcccccggcgacgccgacgatggttggcagctgcgccagctcatcaagggttacgccgaggagttcccgatggatctccagtccttctaccggccggccgtcggcctgcaggaaataacctaaaatgtcgccgaccgcgcctttgcgcgcgtacatcagctgttcgccctcgctgatatagccggagcgtaaaatggtggcgtcgcgccgctgatcgatggcgccaatgccaaccaccgccgcgtccgccgccgtcgccgccagcatcacgtcgcgcacgctcgactcgcggcgcaggatctcggcgacctccgccgaagagacccgcagcggcgccgggataatgctgacgctgcaggcggcatcaagctggccgatgccggtcatataggggccgacgccgccggagagggtcaccagccgcacctgctgcgagccaataaagccgctgagatgctgcaggcagctcatcgtggcttcgccgaaaccgactgccaataattgccccggttgcagaatgcccatcagcgattgcgccgcgccgatacccagccgggtattcatcggcggggtgttgagcgccggcagtacgcgggcaatcttgaggccaaagcgctgctggagttcactttccagtgccagacagccctcatagcgcgagttgatctgcacgcggatcaccccggactgacggcctttctccagcaggcgagaaatcttcagccgcggcagccccaaacgctcgccgatgtcattttgcgtcaggccgtcgtggtagtagcaccacgccacccgcgccaccagctcttcctcggctaacgccagcccggcgtagcggttctcttccgtaatgcgtttttcgctcataaattgaactcttataaaaatttagatcatatgttcgctattgcgcggtcggaaagtgtgagccgactggcaaaacggatctttcatcgctggccccttttttcctgacgatctaaagcgccaaactgtgatcttcgcacggttgtaaatatagttcaccgtctacgcttttgaacattattaaatttaaaaatcatttgttcaatcgaggcgcgatgatgaagccactgctcgaagctcgccacatctgcaaacagttctccggcgttgcggtgctgaaaggtatcgatttcacgctaggcacgggccaggtgcatgcgctgatggggggcaacggcgcgggtaaatcgacgctgatgaagatcatcgccggcgtcgaaacgccggatagcggtgaactgacgatcggcgaacgcgcgtttgcgcgcctcaatccggcgctggctcatcagttaggcatctatctggtgccacaggagccgatgctgtttcccaacctcagcgtgcgcgagaacattcttttccgcctgccgaagcgggcggataccgccgcgcggttgcaggacaaactgcggcagctgaactgccagatcaatctcgatgccagcggcagcacgctcgaggtggccgatcaacagatggtcgagatcctgcgcgggctgatgcgcgaggcgcggatcctgatcctggatgaacccaccgcctctttaacgccgggtgaaaccgagagactgtttagccagatccgctcgttacaggcgctggacgttgggatcgtctttatctcacacaaattgcccgaaatccgccagcttgccagccatatttcggtgatgcgcgacggcgcggtggtgctgagcggcgagaccgcggcataccgcgacgagcaactgattaacgctatgacgccggtcagccgtgatcatgcgctgaacgacacgcaaaagctgtggctgtcgctaccgggcaaccgccgtactcaaccgcaggattttcccgtgctgcgggtggaagatcttaccggagaaggttttatcgatctcaatctggagatccgctccggagagattgtcggactggccgggctggtgggatccgggcgcaccgaatttgccgaaaccttatacggcctgcgtccaccgcgtgccgggcggatctggctggagaaccgcgagattagccgcgacagcacccgcgccaggttggctagcgggctggtctatctgccggaagaccgccaggtctcggggctgtttctcgatgcgccagtgcgctggaacacggtgatgttccatcagccgtcgtggtggcagcaggggaaacgggaggcggcggtggttgagcgctatcaccgggcgctggggatcaagctggccgatggcgatcagccggtgcgcactctctctggcggtaaccagcagaaggtgctgctggcgcgctgtctggaagccaatccgttactgctgattgtcgatgagccgacgcgcggtgtggatgtctccgcccgcgccgatatctatcaactgctaaaaagcgttgccgcgcaaaacgtggcggtgctgatgatctcttccgatgtggatgagttcgtcgatcttgccgaccgggtgctggtgatgcatcagggccgctacagcggtgagctggcgcgacaggcggtgaccgtcgatcgcatgatgaccctggccttcggaggacaggcatgaaaacgttactgaagaatcgcgaactgagcgccttctttgccatcgtggcgctctttgtcgtgctggtggcgctcaatccagcctatttcagcctgcagaccctggcgatgattttcgccagctcgcagatcctctgcctgctggcattgggcgcgacgctggtgatgctgacccgcaatattgacgtgtcggtaggttcgaccgttgggctgtgcgccatcgccgtcggcgtggcgctgaacaacggctacgggctggcgacggcaatcgccttcgcgctggcgattggcgcgctggccggagcttttaacggactgctggtagtgggactgcgcattccggcgatcgtcgcgacgctcggcacgctggggttgtatcgtggggtgatgttgctgtggaccggcggtaaatggatcgaaggcttgcccgacagcctgaaatcgctatcagagcccgcgtttatcggcgtgtcgccgctgggctggctagtgctggcgctgctgctggcgggtgcctggctgctgtcgcgtaccgcctctggacgtgatttctatgccgttggcgataacctcgccgccgcgcgccaactgggcgtggcggtcaaccgcacgcgaatgctggcctttaccctcaacggtatgctggcggcctgcgccgggatcgtcttcgccgcgcagattggttttgtgcctaatcagaccggcagcggcctggagatgaaagccatcgccgcctgcgtgctgggcgggatctcgctgctcggcggcaccggcacgctgcttggcgcatttctcggcgcctttttcctcacccaaattgacaccgtactggtgctgttccgccttcccgcctggtggaatgactttatcgccggcctggtgctgctcggggtgctggtgctcgatggccgcctgcgccaggcgctggcccgccatcagcgggcgctgaagtacagccgtttccagccaggtaacaaaggaagcaaacaggttgcccgctttcccgaacgcaaaagcaaagaggtggcttaaatgaagctgaagcttaactgggaaagcgcgctgctggcgttgctgatcgcggaaatcctgctattcggcgccttgaatccgcgcatgctggatctcaatatgctgctctttagcaccagcgactttatctgcatcggcatcgtcgcgctgccgctgacgctggtgatcatcagcggcgggatcgatatttcgctgggctcgaccatcggcctgtgcgccatcgccctcggggtgatgacccaggcgggttggccgctgtggctcgcggtatcgctgacgttgctgttggggctgctgtgcgggttattcaacgccgcgctgattcactacaccggtatcagcccgctggtgatcacgcttggtacgctgtatctgtatggcggcggcgcgctgctgctttccgggatggccggcgcgaccggttacgaggggattggcggttttcccgatagcttcaccgccttcgccaatttaaccctcgccggactgccgctgccgctggtgctattcgcgattatcacctttttcttctggctactggcccatcgcgggcgctttggccgccacctctttttacttgggcaaaacccgcgcgccgcgcgctatgccgcgctgtcggtgaacggcatcccgtacgtgctgtatggcctggttggcgtcgcctcggcggtcgcggctctggtgatggtctcctatttcggctcggcgcgttcggatttaggccgcgacctgctgatgccggcgctgaccgcggcggtgctcggcggggctaatatttacggcggctcgggatcgatactgggtaccgcgctggcggcattgctggtggggtatctgcaacagggtttacagatggtcggcatccccaaccaggtgtcgagcgcgctgtcaggggcgctgttggttgtggtggtgatggggcgttcgctgagcctgcaccgtgaatgggtgcgcgcgacctggcggcgtcttttctcgcataaaacaatcggagcataaaatgaaattaaaactgatcgtgctggcgctggcgatgagtgtggttaccgcgcaagcggcggaccgcatcgcctttattcctaagctggtcggcgtcggcttctttaccagcggcggcaacggcgcgaaagaggcggggaaagcgctgggtgtggatgtcacctatgacggtccaaccgagcccagcgtctccggccaggtgcagcttatcaacaacttcgtcaaccagggctacaacgcgattatcgtctccgccgtctcgccggatggcctgtgtccggcgctgaagcgggcgatgcagcgcggggtgaaagtcctgacctgggattccgataccaagccggagtgccgcagcatctatatcaaccagggcacgccgcagcagctcggcggcctgctggtcgagatggcggaaaagcaggtcagcaaacctgccgccaaagtcgcgtttttctactccagcccgacggtgaccgaccagaaccagtgggtgaaggaagccaaagccaaaatcgaaaaagaacatccgcagtggcaaatcgtcaccacccagtttggctataacgatgccaccaaatcgctgcaaaccgccgagggatcttaaaagcgtatccggatctcgacgccattatcgcgccagatgccaatgcgctgccggcggcggcgcaggcggcggagaacctcaagcgtcagggcgtggcgatcgtcggctttagtactccgaacgtgatgcgcccgtacgttgagcgcggcacggtgaaagcgttcggcctgtgggatgtggttcagcagggcaaaattgcggttaacgtcgccgatcgattgctgaaaaagggcgatcttaacgtcggcgacagcgttgaggtgaaagatatcggctcgctgaaggtcgaaccgaatagcgtgcagggctaccagtatgaggcgaagggcaacggtatcgtgctgctgccggagcgagtggtgttcagcaaagagaacatcaacaactacgacttctgacggaggaaaagatggctgatttagacgatatcaaagagggtaaggacttcggcatcgaccgcccgcagcagaatacgctgtataccctgaaaggctgtggttcactggattggggcatgcagtcacggctggcgcgcatctttaatccgcacagcaaccgcacggtgatgctggccttcgatcacggctacttccagggccaacgaccgggcttgagcgtatcgacctgtcgattgcgccgctgtttgccgacaccgacgtgctgatgtgcacccgcggcgtattgcgcagccaggtaccggcggccaccaataagccggtggtgctgcgcgcctccggcggcaattcgattttgagcgaactctccaacgaatgcgtggcggtggcgatggaagacgcgctgcgtctcaacgtttgcgcggtggcggcgcaggtctatatcggcagcgaatacgaacatcagtcgatcaataacatcatcaaactggtggatgccggcaatcgctacggtatgccggtactggcggttaccggcgttggtaaagagatgacccgcgatgcgcgctacttttcgctggccagccggattgccgccgaaatgggggcgcagtttgtgaagacctatttcgttgaggaaggctttgaaaaagtgaccgccagctgtccggtgccgatcgtcatcgccggcggtaaaaaactgccggagcatgaggcgctggagatgtgctggcgggcgatcgaccagggggcttccggggtggatatggggcgcaatatcttccagtccagcgccccgcgcgcgatgctgaaggcggtgaaaaaggtggtgcatgagaatctgaatgcgcgcgaagcgtatcagttctggcaggaagaaaaacagggagagctgaaatgaacgtgacgctggtggagatcaatattaaacccgagcgggtggatgagtttctcgaggtgtttcgcgccaaccacgagggcgcgctgcgggaaccaggtaacctgcgctttgatgtcctgcaggatccagaagtgaaaacccgcttttttatctacgaagcctataaagacgatgaggcggtgctggcacataagaagacgccgcactatttagcctgcgtcgaaaagctggaggagatgatgtcgcagccgcggcagaagcgcagctttatcggcctgttaccgcagatgtgaggttccctctccctgtgggagaggggcaagctgaggggaattactgcttacggaaaaactcgttatacaacatatataaatgcgccgcgctccacgagaagttgggcgcccctgctgggcgcctgtcagcggattgtagttctcctgaatcgggccatcggcggttaagcctttggcgtgctggaagaaggcgtccgccagcttcaacgcctcatcgcgatgaccgtagcgctccattcccttcaggccgaaccaaaactgatctacccacacccgtccgcgccagtaaatatcggcgccaaaggccgggttggtcagcgcggcggtgcccagaggcacaaaggtgttgaactctttcgggtcgagcatcaccgaaaccacatcgtcagcatgttgctgcgtcgccgcgccgttaaacagcggcgaccagccttccggccctttgccgcgctcgacgatcggtttaccggcgcagccgttggccagcggttgttcttcgatacgaatgtcgtaatagaaacgagtctgcgggtcgaacatgcaagtattgatataatccgccagcttcgccgccagcgtctgatagcgctttgcctcttccgctttgccaagaattgtcgccatctgcgccagatagtggttatcgctgtacatatagctggcctgatcgaccgattcctggagcagcgaataccccagcaggttgccgtcgcggtcgcggttttcggcgaattgcaccgtccagtcgctgcgtttgccgccgttggcgacgtatttatccagctgttctttatcgataaaaccaaataccgccgcatcgtcgcgcccggactcccacgacgccgctacctgcgccgggatttcgaggctgtcgtaatcgcctttggccgtcacccgttcgtaggcgcgaaggccggaaagcgtctgctcggtttgcccttttttcaccgtgaacagcatggcgccgtcggcggtgttgtgcgccttatcgcgggtcgcgccatattccggcacgccgttaccgttatggtcgcgattgcgcagccaccagtcgtgataggccaccagcttcggatacatctcttccagccacgctttatctttggtgacgttatatacctccatcaccgaccaggccgcgaggcttggcttggtgttgcgttcgttccagttgccgccgtcgccgccgcgctcggggctcaggttccaggcgatcagatcgggcacaaatccggcatcctgcgggcgcaccttatcattggcttttatctgccaggagaagacggcgcggatattctctttggcgatatccgggttgaagtgggccatggcgtaggcctgtttccaggtatcccacggccaggtctggttgccggagaaccagcggccggtcacggatggggtgacggtatggtaatgcaccgcgccgcccggcgcgcgccagttgccgttgagcgtctcaatggctttcaccgccactcgggtttgttctgcggtagcgtcggggttgctgagccctttttgcagataaccgtcccagcgctgttcggaggcggtgagatagtaagccggccgcgccagaatatcgcggatctgcgctttttctcgccgcgcttgctccgcggtgagcaggtgcgaataggtggtgtagagggtggtggagccgcggatctccgcgctgctgataaagcggtggccgtcgatacgagtctcggttaccagcgaacggtggatctgatactgcgattcgccggaggtcatcaggtcggaggcggcgcgaaccttgccaaagctgaccgtcaggccgtcgggcgtggcgctcagacggcgctgatagtccgggaaggtttcatcaatggttttgtccgatagcgctttaccctctttggcggccagtttttccagcagttcgccatcccataccagcttcagcggagtgttgctggtgattttggtctccagtagcgaagtgtgggcgctggcgaagcgcagcgtcatctccaccttcacgccgggggcggtcagcgtttgtttcagcgcgcccggcaggctccaggcctgcagggtgaaattgacctttttgccgttctgatacaccgtcaggcgatcgaagttggtggccataaagttgatgtactcttcggtcagcagcgccgggccggggaaaccgcccatggtcgccgggccgtcgggcagcaggtggccgtgccacgcccgaggtcgaaaaaggggttgaaacgctggtggtcatcggcgtcgaaatcctgcatgtactgcggcgcgccgctgcggtcgatgacgtttttaaacgcctgcgcggtgacggcgtgggcggaaaaactcagcatcagcgcgcaggccagcggcgtcagcgtagtggtgaggttcatggtatctcggctccttgttaccagtagaagtattgcatcaggaaaattttgtcgctcgggtcgccgctggcgttgctggtatagaaacggctgtcggcggcggtggcgaaacgcccgccgccgtattcgtaccagatgccaaattgcataaacgcggtggtttcatcagcggcgtggtccgggcggtgtttggcgtagctgtatgcggtggataaatagagcccgcttaatgcttcatacatggcgctggccataaagccggtttcgctgccggggacatccagccctttggcgcggccggtatggtgccaggcgcggaaggccagattgggcgacagaacgccggtcaggaatagctgcccggtgccgtcggtcacttcaagaccgttcatccaggtgacatctttgacgatgtcgtactgcacgtagccgttgaccattgccgggtaggtgtacttatcgtcatagcgatcgtatttgccgaagtgcagccaggccttgctttcatcgtgatgcccggccggcgtggcggtgacgctatagcggaaatcgccgctgcggttttgtactttcagcgcgtacatgatgtcgcgggtattggggatcacgtaacccagatcgggggtaaagtcgccccaccactgcaggtcgtccagcgacgagtcctggcgcaggctgagcatgatctcggtgttgttatcggttttatagccgccatagaggcggttaaggccgccttccacgccgccccaactgtggcccggcgtccaggcattgccctggctatcggcctgtaccgtccaggcttcgccgtagatcagcccgaaccagtggccgtttttgacctccagcccgccctcgatataggtgccatcgctgtatttatgtttgtcctcgccttctaaatccatgtatccgccaacccccaactcgccgtaaaagcgataggaggtggtggtcaattccggcgttttggtatcgtcgtgctcggccggatggacagtctcagcggccgccgcaggggcgcaaaaagccagggcaacgagtgccccgtataagtaagggttagttttcatttttttaggtatttaagaggtatgggaagccggagccgcttctatttgttgttgttcatgggttaatcctttgacgtatcggctgtatttccaccacgcgaagccaaggaaaatcacgatcccgccgacgttgtagaaaataatggtcaggatgttgccgccggttgggaaggttgaggcgacgaagccgatggcgaaaatcacaatcagcatggataccaccacgatgccggtggtacgcgagcccatgcggaaatcgcgcggcagatggtcgagcttgcggcgcaggttgaggtaggccagcatgatgaacagcggcggcagcatggaagcggcggcggtcatgttgatgatggtgttcatcagatcctgcacggtgttggatcccaacgtcgggatgatcatcagcggaatgacgatcagatactggatccaggccgcgcgcgccgggacgccgttctcattgagctcgacggtttttttaccaaagatgccggagggaatttccgagaagaaaattttaaccggggtggcggtccacatcagcagcgagccaaacattgcggtaaacgaaacgaggccgacgaagcggttcatcagaatttccggcaggccgaagtaagccgccaggccgtggaacacctgcaccgatccgccggtaaacttcagctctttgctgctgacgaagacgttaatcagtacggaggagatcgagtacagcacgccgatgaagatcccggcgaggatgatcactttgacgaaggatttcgagccacctttcacatcgttgacgtataccgccaccgattccgcgccgcccgccgccataaagatccacgtggtaataccgaggaacgcccaattgaagttagggatcatcgcctcgacggtgatcggatccgctggctgtacgccccccaccagcgcggtaccggccagcagaatataagagagcgtcagcagcagcatcagcgatgaggtgacggaggtgataggccccagcattttcgcgccgttggtggagatccaggtggagaaggcgaacagcgccatgctcagcacggtggtggcgaacggcgtcagaatgtattcgtagccgaggaaggcgtaagaggcataggcgatcacgcgcggcagcagcgaggtgaagaaaaacaggtttacgaaccagtaggtataggcggtgataaacgcccaacggccgccgagcgaactcttcacccaggcgtaaaccccggcctcggagtttttattcagtgacacgaactcggcgataatcaggcaaaacggaatgaagtagaacagggtagcgaggaagaacatcggcgccgacgccagccccagttcgatattgttgttgatgacgttattgaaactgtaaacggcggcaaaggtcagcgataacaggccgaacttgccgatggtattacgtttagtatcagacataacacatctccacacattgtccttcagagggtcgctgaagggggttgtgttgtttgtagggtagaggtagttaagatttaatgtcgattttagtaaaagttttagtaaatagaagtaaagaaaccgaatagctttaactcgatcacgaaaaaggttgagtaatacgtaatcaggccagggttaaaaaaatcccgccagccgacgaggggctgacgggacgacaggaacgttatttaccggcggcggcagcgttaaccggcgccgcggcgcgcagacgttgctgctttttttcaaagcgggtgatccaccaccacgccaggccggagaagaccgcggtcataaagacgttgataaagaaagcgttaaccagatcgacgcccggcgggaaagcggaagcggtcatgctaaccacgaaaatcactatcagcattgataccacgctcatgcccacttttcttgagcccatacggaagtcgcgcggcgtgtcatcgtgtttccagcggaagacgaagtaggcggccatgatgaacagcggcggtagcatggcggtgccggcggtgagattaatggcggtgttcatcatctgctgcacgctggcggaaccgaagccgttaacaatcaacatcaggaaaacgaacaggaactgccaccaggcggcgcgtaccggcacgccgtgagcgttcaactcggtggttttctggccgtagatacccttcgggatttccgagaagtggattttgaccggcgcggcggtccacatcatcatgctgccgaagatggcgataaacagaatgatgccaacgaagcggcccatcagcgcttcagaaatgtggaagtaggcgccgagaccggtaaagatttccaccattccgccggcgtaggtcaggttttcacgggcgacaaagacgttaaccagtagcgaacctaaggcatacataccgccaatcagtaccccggcggtgatgatgactttaataaaggatttctgcccgcccttggtgtcgttgaggtaggcggcaacggtttccgcgccgcccgcggcctggaaaatccagcacatgataccgagcgtcgcccagttgatggtcggctccatcgccgccagggtaatcggctgcgccgggacgtgaccggaacccagcgcggtcagcgcgccgacgacgtaaatcgcgaacaaagcgaacacgccgtaggccacgcattcggaaattttacccagccaggtcgcgcccttggtcgaaatgtgggtggccatggcgaacagcacgatggagataagcgaggtcaccatcggcgagaaggggatcgcgtaaccggtgattgcgtatgaggcgtaggccactacgttcggcaacagcgagaggaaaaagaacaggttcacaaaccagtagaggaaggaaccaagataggcggcgcgggtacccagcggttgcttcagccacgcgtacatcccggattcagagtgtttattggccgagacgaattcggcgatgataaacacgaacgggataaagtaaacgatagtggcgaataagaagataggcgcggaactgagccctaactcaatgttgttattgacgatatttcgcacgttaaagaccgcggtaaaggccatcgatagcagcgcgaacttgccgattttggcacgtacagactcggacatacgtcctccaatcattcatctacccgccgcagcgggctggaaccgaaaggccaacgggcgtacccgttgacctcccttgtcgcttaacgtgggtttacttattgaggaagtatccgtcttcaaccgtgactcgcagcaccactttttttaccggcgcatcgcagataaagcggtaggcttcgtcgatatcgcaaatcaccatctgcccttcgtgaaccttcaccgtttcaccgatccctttcaggtattcgcgatcggtttcgtcgcggtagcaggcgacggtttgcagattttctttggcggcaaactcgattttctgctgaccttgcaggtaatagtgaacctcaaagtagcggcggttgccgacaaatagcgcatcggtcgtactatcggtttccacccgataggagagcgaatcgccaatggaatgcgccacgccctggcggatgttgtcgatgttattgatggcttccacgcagcgctgccatttgcggccgctatgataaacctgcttaaactgttctaaattatcgagaattctcattgttcagcctcgctgtgtgcaacgggggaaaagaaaccggcgccgaagctatggttcgccagtacctgcgaggtgccgcatccgccctccagcggcagcagcgtaaagccatagttaaaggtgttgagccagacgcgccagctatccagcacttcgctgccccaggagttggagccgaggccgagcagttgcgcatcgatattcagggtgatgtcatcgctgcgctgcagttcgttgcagtgctgggcggcgtgcaggttttctgccgtaaagtgccacgcgctgacgttgagcggattgcgcggaacgactagcagaccgctgccgtggcggtcgctgaacgatgcccagcgcacgtgctgacgattagcgttgttctgcgggaatggataattgacgaacatatcgtcgacggtggtatgccagatatcaatgatgttgctttgctggctgtcggcgtagttctcgcccggtccgcggccatagtagttcacctggtcgaactctccgttaatgcccagcataaagccgatgcacgggacgatgtgcggatagtcgccgtagcgctcgccggccagctcaacgttgatgtgaccctgcggggtaatctgccagcgataggtacagcgcataccgaagtcgaacaccggcggcgcaatcacgctgcgggtggtgatcaccaccgtttcgccctctatttcagcgctgaattcgcgcagatgctcctgcattatctgcaggtgggccggctgccacagtccttcgtattcctgtttatggttatcaatcattggtttgaagaagttaatcttcggctcgcgggttacctggtcgacgccgttgacctgccattcgctcagtttgccgctgaccttgctgaacaccacgcggaagttatggccgcagatggtgtagctgaggcgctcatcgacaatctgcagcggcgtggcgctggcgtttaacagcggcgttcgcgcggcggtccgcgctttaagcgggaactgatagacggcgatatcgtgattggcttcgctatacggggtgcgcgaatctttggtcaccatgatgttgacgaatgcttcacgttcgtcgagctgcggcagggcgatttgcaggtcgcggccgctgttcggcgccaggtctttcactttcagcaactgactggagagcgtttcgccttcggcgcgcacttcaacgcgcagggtgtagtcatcgagagtggagaaccacagtttgttttccacccgcagttcgccgcggcagatatcccgcgcctgtactttcaccggggcgatgacctgtttgtattcgcgcaggcccggccccggcgtctggtcggagaaaatcagcccatcgaggcagaagttgtagttgttcgggtagtcgccataatcgccgccaaacttgtaccacaccgcgccgttttcatcgctggcctggataccgtgatcgcaccattcccacacgtagtggccctggatgcagtcatgctggtagaagacgttctggtattcggttaatccgccgggaccgttgcccatcgcatgcgcgtattcgcagataatgcgcggtttttcatgcggatgctcgccaaattcgttcatcaacggcacgcgggtgtacatagtggagatgatatccaccacctcggcgtcgcggtcctcttcgtagtgcaccagccgggtatcatccagcgctttggtggcctggtacatggcgcggatattgcagccatagccggattcgttacctagcgaccagatgacgatcgacggatggtttttctgcgcgtgcacgtggcgcacgatgcgctcaacgtagatgtgttcccaggccgggtcgtcggtgatggcgctgaggttgccgacgttggcgaaaccgtgggactccacgtcggtttccgccatcacgaaaagtccgtagatatcgcacatttcatagaaacgcgggtcgttcgggtagtgggcggtgcgtaccgagttgatgttatgctgcttcatcagcagcaaatctttttccacgcgatccatgccgaccgcgcggcctttcaaatggtcgttatcgtggcggtttacgccgtgcagcatcacgtagcggttattaatatagaacaggccgccacgcactttgatatcgcggaaaccgacgcgctgcgggatgatttccagcacctcgccggcggcgttctttaacgtcagcaccagatgatagagatacgggctttccgccgaccactgctgcggcgcgctcacatcaatcgtgaagccggtgtttagctgctgactgacctgcagttgaccgacgttgcccgaataaagcgccttttcgccgtcgaacagagtatattccagcgtcgccgccgccgtctgcggagccaggttttccagcgtcagctggcaggaaagcgttgcgtcgatgtagtcatcgttaaaatcggtgcgcacggtgaaatcctgcacgtgcagcagattttttcccaccagatagacgtcgcggaaaatgcccgccgaccaccacatgtcctgatcttcaatataggtggagtccgcccactgcataacgcgcacgcacagcaggttgtcgccggtttgcaccgccgcgctgatatcgaactcggcggtcaggcggctgcccttgctaaagccgatgtactggccgttaacgtagacttcgaaataggtttcgacgccatcgaatttgatgatggtttgcttgccttgccagccgtcgccgagggtgaacaggcgctggtaggcgccggtcgggttatcggtcgggacatagggcacgtcgatagggaaggggaaaccttcgtcggtgtactgcagctggccgtggccttccatctgccacatacccggtacggtaatcggcccccactcgttctgatagcatgaggtaaagctctccggtaccagcaacgggttggtgaagaagcgaaagttccactgtccgctgagggacaggaagcggctgctggtttcgcgggcgaaggtccgcgcctgggccagtgagtcgtaagagaagaaatacgcccgcggcggcagcctgttttcatgagtgagttgaaggttttcccagcgattcatatcgcctccctgaacggcttaataagataaaattcattttagtaaaacttttactaaaatgaatcgtcagggatgatttactttaactcgatcacaaaatgaaccgctttgtgtcggatagcggcttcgccttacccgacctacagaatggcatttcggccaggactggtagcccggccaagcgtagcgccgccgggatatggttggattaacgggtggtgccgcgcagcttcaatacgctgggaacaaaaacgttaagcggcagggcgcggccatcgcgggccttctcgatcagcaggttcacccctggctgcccatcatttcggagtggatccgcaccgttgacagcggcgggaaggtaaagcgcgcggtggggatatcattgacgctaatcagcgaaatatcttccgggatcgccagcccgcgttcgtgaatggcgcgcagcacgccgatggcgatggagtccgaggcgacaaacagcgcccgcggaaactccgcttgcgccagcatctgcttcgccagctcgtaaccggacgagctggaaaaaccgccgcgccagatatcatcggctgaaaccactcccttcaactgaccgtactccacaaacgccacttcgcgaatatcggccttgccgggctggtcctggccgccgataaatccaatgcgcgacgcgccctgctggataaagaagtcgaccacctctttagcgatacgtaccaggtcgatatccaccgcatcgtacgggctgccggcttcgtggaaatcaataaagcagatattgtcggtcagcgcgctggcggtctcgcgcagctcgcgcgtcggctggccaataatcaatacgccggtgacctttttcagctctggcagggtgttattgagatagcagttggtgagctcgatggcgagcttttcgcattgggtttcaataccgtggcgaatggcgagatagtaagggtcgttaatttccagctcttgctggtagctatacagcgccaggatatgatgatggccgacgggtaggacctgcgttttacgcgcgctgctgcttttatactccagcttctccgcaatctcgagaatgcgatgcttggtctcttcttttacgttcagggtgggatcgtcgtttaacacccgggaaaccgtcgccagcgaaacacccgcttcggtcgcaatgtcttttagcgttgccatctttttcctttatcggacgttgcccatgtttgctcatccattgtaaagcaagcgtcgcgtcctgcaccttatttcagtaaaaaacgcctgcgtgggagggctattttccccggcgatagcgtgacagaagtagcattattatcagcattatgcagacgaacagcaaaaacttgctatcttttagtaaaaatttactggaggtgagagatggataccgtagcttacgctgattttgccaaactggagatgcgcgtcggtaagattgtcgaggtgaaacgccatgacaacgctgacaagctgtatattgcgcggattgatgtcggcgaccgcacgctgcagacggtcactagcctggtgccctactacagcgaagaggagctgctgggaaaaacggtagtggtcctgtgtaatctggcgaaagccaaaatgcgtggtgaaacttctgagtgcatgctgttatgcgcggaaaccgaggatgaaagcgaaagcgtgctgttgacgccggagcgcgtcatgccggcaggcgtgcgggtggtataacgcgaaaataccctctcccgacgggagagggtcgggtgtgaattatgtctcttcgaccgatatgcgcagtgccgccagcgctttgcgcgccgccttcagcacctgttcgcactgctcgagggtgagcgtcaacggcggttcaacgcggatcgtcttggcgttgtttaacgtcccggcgaccagcacccgctgtctgaacatctcgctggcaaagttgtagccaatctcgttatcgacaaactcaatggccatcagcatgcctttcccacggacttcattcaccagatccggatattcgcgcgccagttgacgaaagccgtccagcaacagatcgcctttttgctccgcctgcgccggcaggttctgcgagagcaagacgttgatcgtcgccagcgccgccgcgcaggccagcgggttgccgccgaaggtggtggtgtgcaggaatgggttatcgaacagcaccgagaagacctcttccgtcgctaccgttgcgccgatcggcattacgccgccgccgagcgctttagccagacatagaatatccggttgcacgttttcatgctcgcaggcgaacattttgccggtgcggcccatgccggtctgtacctcgtcgaggatcagcaacgcgccaaactcgtcgcacagtttacggaccgccggtaagtaacccgccggcggcaggatcacgccgccttcgccctggataggctcaaggatcaccgccgcgacgtcatcgccggttttcttgcattcgctcagaatggaacgcatggcgttgatatcgccgaacggtacgtggcggaagcccggcagtagcggcataaacggtttacggaaggtcgatttcgcggtagccgacagcgcgcccagcgatttaccgtgaaacgcgccgctggtggcgacgaaggtaaatttgccacgcggggactgataggcttttgccagcttcagcgccgcttccacggattccgtaccgctattgcagaagaaactgtatttgagtttgccgggcgttaaggccgccagcgttttcgccagcatcgcccgtagcgggtccagcagctcctggctgtgaagcggttgtttcgcgagttgattttcgacggcggataccacaactggattacggtgccctacattgaagatgccaaacccaccaaggcagtcgataaactcctgtccctgggtgtcgacaagcgtatttaaccctcccgcttgccactctacggctccgtaatccccgccggctgtgaccgattttctatactccagaaaccccgggttcacatgttctttaaagtattctctcacctcctggttcagtgctttcatttcgtcatgggagagcgattgcttctcaatgagattcagtgcgtgcgcgctgcaggccagagccgatgcgctggaaggtaacctgttcaaaatgtgctcctggggggcgtatcacatgatactgaattaagtattgcagggattacgccagcctggcagcgacgatgaaaatcgggataaacgcaaagttaaggcgcaattgtgcaaaatttaatctcataacttaaatattggcacgttttattcctgaggctgcaagataaactgccgttggggtgtgaagcggtttgacgtggggtggtgcaggctgcttcatcatagagcagcctgggaacgttggcggtacgagaggttaatcgagctgggagatttccattgccgcgcggtcaatcacgccgatgatctgtttcaattgagcgtcgctgatgctctgctggttgaccttcaggtccagcaccgctttaaagttttccagcgcgcgtttcatctgcggatttttgcgcaattcgcagccgaccatgcgttcctgcaggcgcgtctgaatttggcttaactgctcgccgctttcggcgcacaggcggcgtccgtcttcagtgatagcgatctttttacgcccattttcctcttctacgctaatcaatccctgatcctgcagcaggtcgagcgtcggatagataacgccggggctggggctgtaattgccctgcgtcagcgcctcaatctctttaatcagctcatagccgtggctggcgttgcgcgaaaggatatcgaggatcactagccttagttcgccatggccaaagaaacgctggcggcgtccgccgccgcgacggccctgttcgccgtggccctcttcgtgatgatgtcgcatcgatatctcctgtctttttgatatatctaatttatatctaaaaaataacaaatgacaataaattatttttaattaattgatataaaaggatttgtttttgtttttagctttgttgtgactttctttcgctttatatcaaaaaaaacttgccattttcattaatggcaatcattatcatttgcactgagtttagatatatctatttacccttcaccaaggcgacgacggatgaccacaattaatcaagcaaaatatccgcagcgcgtgcgtaacgaactacgttttcgcgaattaaccgtgctgcgcgttgagcgtatcggccaggcgttccagcggattgtgctgggcggcgaagcgctggatggctttgtttcacaaggttttgacgaccacaccaaactgtttttcccgcaggcgggcagcgtatttacaccgccggaggtgaccgacgaaggcattaactggggcgagggcgtgcgcccggcgacccgcgactacacgccgctgtacgatgccgaacgccacgagctggcttacgatttctatatccacgatggcggtattgccagccgctgggcgctggaagccaacgtcggcgataagctggtgatcggcggaccgcgcggctcgctggtggtgccggaagattacgcctggcagctttatgtctgtgacgagtcgggaatgccggcgctgcgccgtcgcctgctgggattacgtcagttgccggtgacgccgcaggtgacggccatcgtcaccatcgcggatgcttcgtataaagattatctggcggatctcgacggctttaatatcgaatgggtggtaggccacaacccggcgttcgtcgccgagcggctggcgcaggttaaggtaccgtcagaagattattttatctggctgaccggagaaggcggcgtagtgaaatcgctgctggcgcgctttgaggatccgagtatcgatcagcaactggtgcgttcgcaggcgtactggcatagcaaataatagatagaacggtaaacccggatggcggcgcgttgcgccttctccgggctacctttcagtggtgttatgtcgccccggtaagcgcagcgccaccggggaagcttagcgttcagccagcgctttaaacaccatcgccaccgcgtgggcgccggggtccatattgccgagcaggctctcgctgttgagataggaggcgcgtccggcgccggctttgctcgactggcaggtgcgatccgcgccggcctgcgccgcggcgaaagcggcctgcaggttatccggttcggccagcagcgccgccagcgccggctgcagggcatcaatcatcgtccggtctccctcatcggcgccgccgtaaaatttcatctgccccagaccggcattcagcgcttccgccacgctggcgccttgttccagcttctgcccggcggcggtgaagaaaatcgacatcaatacgccgctggagccgcccattaccaccgtcaggcgttcgccaattagcgcaaacagcgtgggtaaatcatttagcggcagttgctggcgttgcagcagagcggcaatctcgcgcgcgccggcggcgaaggtggagccggtatcgccgtcgcccactttggcgtccagcgcgttgagatgggtttcgaggccggagagcgtgctggtcacctgcgccacgtaatcgctaacctgcgggttggccgatggcgtaaaggcgacgcgtgcgctggcgagcgtggacggcatgatattaacagcccgtggctgcaccggcttctgccaactggcggtttcgacatccgacagcagcgccttttcaatgctctcttcaagcacgatagtggtcagcgagaagcctttcatatccagcgctgttaccagcgaagccgggccaatcaaccagtcaacgcgcgcatggagtggggtattggccagctcgcgggtcagaatcgccatctcggccaccgatacgccgccgaggttattgagcatcaccgccaggcggccggtttcaggtagggcggcggtcagcttctctaccataatctgcatgatttccgcgctgttatgggtcgggatcgtcgaagctcccggttcgccgtggatgcccatccccagctcggcgtggccgggctgatggcgcggcgcgctttccgcttcctgcggcaggtgacaactggcaagcgccacccctatgctggcggtatggttggcggcgtattgcgcttcacgcagaacggtggcgaggttgaagccgcgctcggcgaaatagcccgccactttatgcaccagaatggtcccggcgatgccgcgcggctgtttgttatccggcagcgaaatatcgtcgccgacgatcagcatttccacgttgtagccgagtcggcgcgctttctccgccgcgaggccgaagttaagccgatcgccggtgtagtttttgacgatcagcagacagcccgcctcgccggtcaccgcctgaatcgcggtgagtaccgcatcgacgctcggcgaggcgaacagatcgccgcagaccgcagcggtcagcatgcctttaccaacaaagccgacgtgcgccggttcatggccggaaccgccgccggaaatcaccgccacgttgtttttattcagatcgcggcgcaccactacgcggatcgccgggtcgctctccagcctggcgaggttgttccacgggctggcaataatggttccctcgatcacgtcgttaacgaggctggcgcgctggttaaaaaagaattgagacatagtggttcctgatcagtaagcgaaaactcaccctccggaggcgggcccccggagtggtaacggtcaaagtggatttagcgacgaataagacgttgctgacgcatatcgagcgtgatggcttcgccaggctgaatatcattcagcgcttcgccctgctggcatagccaggcgatccccgccgcgcgggcgataatcgcgccgtgggcctgttcgctgccatcgcgcaggcacaggccggtgatctggctggcatccagttggagtacggtcgagggataaatattgtcggcgataataatcgtcggctcactggcgaatggcagcgtctcctttataccctgcagatggcgcagcgtgcgctgcagaatatcgtcgacatcgatgtaacgggcctgcagataggcgtcatccaactgacgatactgctggctgagctccatcagcacctgatgccacgcccattccgccgagcactgttcggtgagcaggcgatcgttggcggcatcaaacagatcttcatcgtcgagcaaggtgtgatgaccggcgaagatcgccgcgatatcggcgttaaatttgttttccgccagttcggtgagtgcattgagatcggccagcgtctggtcgatcgcctgacgcaggcgctgctgctcgcgagcgatgtcggcggcggcggggagcaccggttggatcggcgccagcggataaagcagggcggcgccttcaacacgcgcaggtatggcgggttccgctgtcggctgcgcctccggagactcgccgaagttatcggcggccagcgcctgaaacgccgccagcgcggcatcggcgcccggaccgcgggccagcaggcgcagcttatcgtggcggcgcacctgcagtagagcgatttgattcagactgtccggggtgacgcatttgccgtttttctccagcaccaggtcggcgttaaaacccgccagcgcggcgaccagcttcgatgccggacgcacgtgcaggccgttgtgattgttaataatgactgaaaccgatttagcgtcgccgtcgtcagcaagcgttgaggcggcggcgtcaggcgtgtgcgaaggtaaacccaactgaacccgcttggcttccagcgcgttcatggcatcggcgataaccttgtcgatcccggcgccggaggcggcgctgacggtggccgccagcgtcccttcgaccagcggcgcggcgcacagccgcacctttgccgcaatcgccggatcgagcagatcgagggcggtttcggcgctgagcagggcgctgccgatatccatcatcaccagaacatggtcggtatcggcgacggattcgatcgcctccatgactttaatcggatcggtgccgatcgggctgtcgggatcgtcgatcccggcggcgatcgccagcttacagccatcgttcattaacatctgccgggccagttctccgacaccttcgcccagccgggcgctatgagaaacaataaccaggtttaccatcgcgatttccttactctttggcggcggcagccagcatctgaaccataaacagcaccgaggtcgcgccgggatcctgatgcccgatgctgcgctcgccgagatagctggcgcggcctttacgcgcctgcatggtgatggtggcgtgggcggcgcgctcggccacttcgcaggcggcatccagcgcggcagggatagacagatgttgctcgctggaatgacgcagggattccactaccggcagccagacgtcgcacatcgtcttatcgcccggttccgcttttccgcggttgacgacgccgtccgcgccttcgcggatcatctgataaagctcgtcgagggtcaggctctgatgcgcctgggtgacctgggcggcgcggataaagaaggtgccgaacagcgggccgctggcgccgccgacgttggaaagcagcgtcatcccggtattcttgagaataaaaccgatgtctttatcggcgatcgacgacagcttttcgaccactttgctgaagccgcgatgcatattgaggccatggtcggcgtcaccgatctctttatcaaggccggtgagaaaatcgctttgtttggtgaaaatatcgccgcagcggtacagccagtcgacgatttgcattctgttcagtgacatgtcgtgctccttattttccccagttcagcgccggggtatggaccggggcgtcccataacgccagcgtatcatcatccgctttcagcagggtgatggagaaacccgccatatccagcgaggtgcagtagctgccgatgaggttgcgttcaatcacaatgccggacgcttcgcagcgctgggcaaggcggttgtaaacgccgtacagttcggaaagcggggtggcgccgaggttattgaccagtgcgataacccgatcgccgttttgcagcgcggttttgctctgtttcacttcctgccacgccccttgacgttgtcccactggcgcagggtgcggctgtatgcgccgttttccagcagagtatcgaacatctcatcgacggtttggtcgagcgagctgaagcggcggcggtcgatacccggctcgccgtggatgccgacgccgaactccatctcgtcatctttcagggtaaaggagggctgtccggcggccggtacggtgcaggcgcccagcgcgatgccaatcgagtgaccaaggttatttaaacggcggcccagttcagcgcaggcttccagcgagtcgccgcgttcggcggcggcgccgaccagtttttcaatcagtacggtattggcgacgccgcggcgtccggcggtgtagaggctgtcttttaccgccacgtcgtcatccaccacgacggtggtgaccttaacgccgctttcgtgcagcagctcggtggcggtctcaaaattcaggatgtcgccggtatagtttttgataatcagcaggacgccttcgccgccatcaatctgcatcgcgcattcgaacattttgtccggcgtcggcgaagtgaaaatttccccgggcaggcgccggagagcatgccctggccgatgtagccgcagtgcatcggttcgtgtccgctgccgccgccggagagcagcgccactttgccggcgaccggcgcatcggcgcgggtgacatagaccgggtcctggtgcagcgtcagttcaggatgcgccttcgccaggccgacgagttgttcgctgagtacatcttccacacggttaatcagttttttcattgtttatgctccgtagggtaggggaggtcgcctgtctataagggtagcccggcgatgtagtgattctggctgagcggccgcaaaataaaatgccgtcaaaatgggttccataacggaacgtggaaaagtttttttgttcctttatggaacgttattcgccgataaacaggagaaatgcgagccagcgctaataatttgtccgtttttttctgctatcagagatgaggcaatgatgatttttttcgccattgtgcggcgttgagacgattttctgcgttaaagaggggagacgatagcggcttttttgccaaaatgagccgatcgcgatcgcaatcccatcgctttctcagtcatgttgtttcaatgtgaaacgcattatttttttatctgtttcagaacagaacaaaaaagggaaaaatttttttcgccgctgctcgccctacagtggatgcatcgctccggcagcgtggctgtaagcgccattgatatcaggcgccgcggcatgacggcctgggctcacgtgtcaacatacgcacttatttgagggtgaaaggaatgctaaaagttattcaatctccagccaaatatctccagggacctgatgccgccatgctgtttggcgaatacgctaaaaacctggccgacagcttttttgttatcgccgatgacttcgtgatgaagctggcgggcgacaaagtattgaacggcctgcatagccacaatattagctgccatgcggaacggtttaacggcgagtgcagccatgcggaaatcaaccgcctgatcgccattcttaagcagcacggctgccgcggcgtggtgggtatcggcggcgggaaaaccctcgataccgcgaaggcgatcggctattaccagaagctgccggtggtggtgatcccgacaattgcttcaaccgatgcgccgaccagcgcgctgtcggttatctacaccgaggcgggcgagtttgaagagtatctgatctacccgaaaaacccggatatggtggtgatggacacggcgattatcgccaaagcgccggtacgcttgctggtggccgggatgggcgatgcgctctccacctggtttgaagccaaggcctgcttcgatgcgcgagccaccagcatggcgggcgggcagtccacggcggcggccttgagcctggcgcgcctgtgctatgatacgctgctggcggaaggcgaaaaagcacgcctggcggctcaggctggagtggtgaccgatgcgctggagcgtattgtcgaagccaacacctatctgagcggtatcggttttgagagcagcggcctggccggcgcgcacgcgattcacaacggtttcaccatccttgaagagtgccaccatctgtatcacggcgaaaaagtcgctttcggcaccctggcgcagctggtactgcaaaatagcccgctggaagagatcgaaaccgtgatgggcttctgtgaaaaagtcggcctgccgatcacccttgcgcagatgggcgtgaaagagggtatcgaaagcaaaatccacgcggtggcgaaagccacctgcgcggaaggtgaaaccatccacaatatgccgttcccggtcaccgcggatagcgtctacgccgccatccttaccgctgacctgcttgggcagcagtggctggcgcgttaagtttttcgtatggctctatgccgcggcgcattgcggcatcaactcctccctccggcagccgctgccggagggttttgtcgttttaaatgtgttaactacagcggaaaagggatatgacagctcagactcagggcgcggaaaatgaagtttcggccgttatcagccagtcgtggcatcgctgcagcaaatttatgcagcgggaaacctggcaggcgccgcatcaggcgcaggggctgacctttgaatcgatctgccgtcgcaaaaccgcgctgctgaccatcggccaggcggcgctggaagatgcgtgggagtttatggccaaccgccctgcgcgctgttcatccttgatgagtcggcctgtattctgagccgctgtggcaatccgcagaccctggagcagctggcggaacttggatttcgcgacggcagctactgcgcggagagcattatcggcacctgcgcgctgtcgctggcttcgatgctcgggcagccggtcaacaccgcgggcgacgagcactttaagcaggcgctgcggcgctggtcgttcagttcgacgccggtgttcgataaccatggccgcctgtttggatcgatttcgctatgctgtctgcgcgaagagtgggccccggcggatctgtcgctgacgttggccatcgcccgcgaagtgggtaactcgctgcttaccgacagcctgctggcagaatctaaccgccaccttaatcaaatgtacggcctgctggaaagtatggacgacggggtgatggcgtggaacgagcagggagttctgcagtttctcaacgtgcaggcggccacgctgctgcatctcgatacccaggccagccaggggcgaaatatcaatgagctgctaaccctgccggcgttgctgcgccgcgcgattaaacaggcccgcggccttaatcatgtggaagtgaccttcgagagccagcatcagtttatcgacgcggtgatcaccctgaagcctatcgtggaggagcagggcaatagcttcattttactgctccacccggtggagcagatgcgtcaattaatgaccagccaattgggcaaagtgagccataccttcgaacagatgtcggcggatgacccggaaacccgcaggttgatccactttggtcgccaggcggcacgcggcgctttcccggtgctgctgtgcggtgaggaaggggtgggtaaagaattactgagccaggcgatccataacgaaagcgagcgggcgccgggcccgtatatttcggttaactgccagctgtacgccgacagcgtactgggacaggattttatgggcagcgcgccaaccgacgatgaaaatggccacctcagccgactcgaactggccaacggcggcacgctgttcctggaaaaaatagagtatctggccccgagctgcagtcagcgttgctgcaggtgataaaacagggcgtactgacgcgtcttgatgcccggcggctgattccggtggatgtgaaagtgatcgcaaccaccaccgtcgacctcgcaaacctggtggagcagaaccgttttagccgtcagctgtactatgcgctacattcttttgaaatagtcattccgccgctgcgggcgcggcgcggcagtattccttcgctggtgcatagccgtctgcgtcggctggaaaaacgcttttcatcgcggctgaaggtcgatgacgacgcgctggcccaactgaccgcctactcgtggccgggcaacgattttgaactcaatagcattattgagaatatcgccatgagtagcgaaaacggtcatatccgcctgagcaatctccccgaacatctcttctctacgcggcctggtagcgaggcgtcctcatcgctactgccatcgagcctctccttcagcgccatcgagaaagaggcgattattcaggcggcaagagtgactagcggccgggtacaggagatgtcgcagttgctgaatattggccgtaccacgctgtggcgcaagatgaagcagtacgatatcgacgccgggcagtttaagcgccggggacaggataagagttaagccaacggcgttaatatttttccggcagctcgttgacgatatcaacgagttcgccgtttttcatcgtgatatagccgccgtttttcagatcggaaagtacctgaaacagatagctacgcgacattttggtgcgtcgcaggataaagttcgccaggctcggatcgtgtaatacgccttcatttttctgtttgagataacgataaatcatggagcgaatgacaaaatagcgggtaccaatggctctttcgtcatgcgcatcgagcaaaaacgccagcgtgatggccatcatgttcatcagaaaggtaaatttatcgggctgggtaaaatgtttctcaaagtattcgagatcacagctgaacactttgacattttttttggcggtatagtgcaactgaatgcccggaccataactttcgacaataccaaaaaacatccctttgatgcctttaccgatctgaaacaactttttcgcctgggtttttgcttttcctggggcgacaataaagttgtgctcctgcatctcaacggcaataacgccttcaagaacaataataatctcgcctgtactcagggtgaaaggcgtatcatcagcaatctggcgtatattattgctatgagttaacgagtctatcgcctctatattctttgaaatcatcttattatattcatcgatgatgtgggaatagggcgtttgaatacgactcatcttctctccagactcaattctaccgcttattactctttgctattttgcagtggcgatactttatatttaaacagcgcggaattacgcctgatacaaaatatctaaatttaaaagctggcgccagatagcagacatcacttttagagtccgttaacggactgatctatcgttctttttaatacactcacttagactgttttagtgggtagttgggcttctttttttagtaactaagaatccacctaaatattgaatgataatattgcttttacggcgggtttgtttagcgaaacggtgatagtgattcgctttgcataaattaaaaaataaaaccagaacctgtggatttttattgctttctctacttcacttaagcgcaatcgcctcagtagcgacaacaacatttgccgatgtcgtacatctcatattgagacttatctaatctgacaacgtctgcctgactttagctaaatcgtaagttaaatcaggcgcattctgagcaatgaggtttgaagatgaataaaaaatacaagggtatcggcgtgctggcatttgccgccggttcgttattacccggcgcgacggccaatgccgccgatcaaaatgcggctggctccggcgatggtgcggcaaagaagcccaatattatcctgatcgtctctgacgataccggctatggcgacctcggcgtttacggcggcggcgaaggccgcggtatgccgacgccaaacctcgacaaaatggccgatgaggggatgacctttttcgacttctacggccaaccgagcagcacgccgggccgcgcggcgatgcagaccgggcgcattccaaaccgcagcggtatgaccaccgtggccttccaggggcagggcggcggtttaccgaaagaagagtggacgctggcctcggtactgaaaaccggcggctataaaaccttctttacgggcaaatggcatcttggtgaagccgattacgcgttacctaacgctcagggctacgacgaaatgaaatacgtcggcctctaccacctgaacgcctatacctatgccgacccgacctggttcccggatatggatccgcaactgcgtgaaatgtttgctcgcgtcacccgtggcgcgctctccggcaaggcaggcgaagctccgaaggaagagttcaaaatcaacggccagtatgtgaataccccggtcgttgatggcaaagagggcgtggtcgggatcccattcttcgaccgctacgtcgagaaggcttcgctggactatctcgaagcaaacgcaaaatcttccgaaccgttcttcatgagcatcaactttatgaagaaccaccagccgaacatgccggatccggattacgtcggcaagtcgatgtcgaagagcaaatacgccgactcgatggtggaaatggatgctcgcgtaggccatatcatggataagctgcgtgagttggggatcgataaaaacacccttgtggtatggaccaccgataacggcgcctggcaggacgtttacccagatgccggctatacgccattccgcggtaccaaaggcaccgaccgcgagggcggcagccgcgttccggctatcgcctggtggccaggcaagattaaagagcacagccgtaaccacgatatcgttggcggcctcgatctgatggcgacttttgcttcagtggccgggattaaattaccaaccaaagaccgcgccgggcagccgattatcttcgatagctacgatatttcaccggtactgtttggcacgggtaaagatccgcgtacctcctggttctacttcactgaaaacgagttgaccccggggcggcacgcgtcggccactataaggcggtatttaacctgcgcggcgataacggcgcgaaaaccggcggcctggcggtggattccaacctcggttggaaagggccggagtcgtatgtcgcaacggtgccgcagattttcgacctctggcaggatccgcaggaacgctacgatatctttatgaacaactataccgagcacacctggacgctggtgaccttcaatgaagccatcactaagttgatgaaaacttacgtcgagtatccgccgcgtaagccgcagagcgaagcctatagcgggccgattaccctgtcgcagtaccaacgctttagcaatatccgcgagcagttacaaaaagaagggttccagttggcgatgccgaccggcaactaacatgacgttggcccgggcgagatgtccgggccttttgctgttgtgagcattctagagataggttctggtcgatgaaaaaaagcaccaccattccattaacgccattacagaaccaggggcgctatctgcccgcctataaacgccgctatcacatgatggcgaaacccagcggctccacgtgcaacctggactgtcaatactgtttttatctgcataaagagcagcttctgcatcagccgcacgacaaaggaatgagcgacgaggtactggagaatttcattcgtcagtacatccaaagccaggacggcgaagagattattttctcctggcagggcggcgagccaaccctgatggggctggagtttttcgaaaaggtcgttgagctgcaaaaaaaatatcagccgaagcaccagcgcattgagaacgatctgcagaccaatggcgtgctgattaacgataagtgggccgccttcttgaaggcgcataacttcctggtcggggtatcgatcgatggcccgcgcgagatccacgatcgcttccgcgtgacgcgcagcggcaagccgaccttcgataaggtcatggaagggatcgcggcgctgaagcgccacggcgtgccgttcaacgcgctggcagtcgttaaccgggtgaatgcccgtttcccgcgcgaggtatatcgttttcttacccgtgaattaggcgccacctatatccagtttacgccctgcgtggaggccgccgagtttaaaactaccgcgccgcagttctggcgcgaagagacgatccccatcaccggcagccgccgggcgaaaccgggcgatctggattcgatcgtcaccgactggtcggtggatccggacgattggggacattttctgaccgaagcttttgatgaatgggtgacctacgatctgggccgcgtgcaggtaaatttgttcgaaaccgccgtggtacagactatggggcttccatcccagttatgcatcaccgcgccgttttgcggcaaggcgctggcgattgagaaaaacggcgatgtctactcctgcgatcactacgtctatccggaatataagcttggcaatattaaggcgcacaagctggcgcatatggtcttttccgagcggcagaaagtgtttggaatgggtaagaaagagacgctgccagcctactgcaaaagctgcccgcatctgaatttatgctggggcgaatgcccgaaaaaccgcatcgtgcgcgctccggacggcgaagaagggctcaattatttgtgtcctggctttcgccatttttacgcgacggttaaaccgacgcttgagaagattgccgccatgctgaagtaggtctggctttaggcggtggaataagaaggataaacaatgaaaaaaacagtactgctcagcatgctgctattgagcttcaccagcgcggcagccaccgatatgctgccggcgtggaaagacacccctgctaaacaggctattgagcaatgggtgcagggcgcgacgcgtgaaggcggggcggactttatcccgttagataagcgctacgtggtttttgataatgacggtaccctgtggccggaagcgccgctgaccttccaactgcagttcgcggtggatgaagtgaaacgactggcgccggaacatcctgaatggcaaaaggatccgctggtggcggcggtactgaacaatgatttgaaaacggtagcggcgggcggcgaaaaagggttgctcaagctgctggcgttaacccatagcggcatgaccaccgaggaattcagccagcgggtcagcacatggtttgacagccatcaggataaacgtaccggctgtcgctacgaccagttgggatatcagccgatgcgccagttgctggactatctgcgcgccaatggttttaaaacgtggatcgtttccggcggtggaattgacttcatgcgcgtggtatcggagaaaatgtacggtatccctccggagcaggttatcggttcgttcgcgctcagcgaatttagtctgacggacaatggcacccagcttcgcaaaacgatgaaaggcgcatttaatgatgacgccgcggccaagccggtggcgatccacctgtttatgggtcagcgcccggttgcggctttcggcaacagcgacggcgatctggcgatgctacagtacaccgcagccaacccgaactataaaaccttcgagctgctggtacaccataccgatgcggcgcgggagtatgcctacgacagtcatccttccgccagcggcaagctggtgaaaggattggccgaggcgaaacagaagggctggacggtcgtcgatatgcagcaggactggaagacggtatacgacccggcgcagtgtaaggcgaaataaaaaacgccgccgcgcatttcacgccttaaggggccagcggcggtaacggcggcgactgccaaaagcgccgccagcgccggttgatgccgagaagcgttcgataactccagcggcggccaaaccatcccccaccggccgcggcagcggcaatcactatccacatcaggctctgccaggagacccttcccgtggtaccgcgtagcgtttgctccgcgccgccctgtcgcgccgcggcgacgttcaacgtttctcccgccagcttcgccgttcgccattgatgattaacggtgtcccaccagcgcaagctaatcggcggcagcgtcaacgtgccgctatggctgggcagatagcgcagccgctccacccgatgagcgccgatgacatcgccgcgctcgctttttaatgcctcattgaccggcgccagacgctggctttcgctaccgctaatggcgtacagcagcggtggaatttgccccggtagcgcatcctgcgcctcgacggtcacgatacggtcaacggcatcgccgacccgcagcgtagcgtcctgacccgcgtggtactgttgaatcttctggctgagcgttagctggctggccggtaaaaaatggtctgcctgagtggtattggcaggccattttaccgggcgttccagcgccggaagatgcaccgtgaccggtgcctgattggcggatgacgcggtgatgtcgatcgccggcaggcgtagcacaccctgctgccaggcgctgacctgacgttcaaggcgaatgccgctccagacaatcccgttctttttgcgcgtcaccagctgtgaaggcaacgcggtattcagaagctcgccgtttttgactgcaaactcgggccactgcggcggcgggttaaaccagctatcggtccaccaggtgatcgccacccgaaccggctggccggggacaatctgcgtcggcgcttccagttcacgggtgatatccatagccgcatgcgctggaagcgcggcaaccagcagaaaaagtagcgctttgttcatggcgtggtatctcctgagccgttgcgatacaggcttttcagtagccccgttggcgaaacctccagtgcatcaaaccattgattaacctgcggactctctccggcgatagcgccgatttgctgttgatcgatgccctggtttttctgcaggtcatggaccagcttatccgggccgtcgtccatcgcatcgccctgcgcctgttggcgctcgcgctcttgctgacgaatgcgcatcacgatctgcgagattttgtcgcgattttgcagcgccatgggccagtcaggatgaaggtagagggcgcgatcgtagctgtcgagcgcctgctgccactgcttttgctgagcatagctgttacctagccgcagcaaggtttccgcggttggcggcgcggcgcgaaacgcgctggcggcggcaggatagtcgcccgcacgataccaggcgataccttgccataacggatcgcgatagtgcccggcggcagcggcgtagtcgccgcggttaaaggcgtgctgtccctggatatccgggcgaacccaggcatcgagccaggcggcatcgctatgcggcgaccacagcagcgcgggaaatagaagcgctaccatcagtaactggcgtcgccagaacagtagcaggaacagcatcggcgcgatcagcaggtagccgctgtttttccagtgcagatcctggcgggcgttattttgctgagtcaccgattgttgaatgtggctggcgatgatcggcagatcgtcgccatcatcgccagccagcgtcaccgggatcccggcgtcgcgcaactggcggaaacgatcgacgttcagccgggtatcgatgccgaggctggcatacttatccggcagcgctccacccgcggcggtgccgggtacccaaatttgcagcggtagatgttgtcctttcagccaggcgacatcggcaggcgacagggtatcggcaacaaggatcaggctacgcggactgtctttggctgtgggcaggttttttaacgccagtgcgacggcctgcggcagggcggaaccgctaccttccggcagcaaagagggcgactgggcgttgagaaacagctgataaaactgcgggtccagggttaacggcgtggtgagaaaggcctggctactgtaaaccaccaggccgtaatgtgaaccgggctgtcgttgcatcagcgccgcgattttatgctgcatgcgctgatgacgcgagggggaagatcctgggcatacatcgccagatcctgttgcagaatcaccatcacgttgctttgcggggtgagcgccgccggtagttcacgctgccagctcgggcccgataatgccacaacgccgagcgccagtaaccacggcagcagccgggttaacctgcgacggcgttgaataatcagcgcgcgaaagggtttatccataagcgttgaccaggcggaggcgccgtggaccgggagccaggctaccagcacacatagcagtagcgcggttaagcgccacggatagagaaagtgaaaatcgctcatgccattttctccctgaggacacggccgcaggcggccagcagtagcaatagcagcgcgacggcgagcggccacggatagagcgcctgatgccaggaccagccgaggcttttgacctgcgccggagtgagagcgtcgatttgttgccagacgctatccagcgcgctgccggaatgcgcggcggtccagctctggccgccggtggttttcgcgatacgctgcagtagcggcaaatcgactttgtctttgctggtatcgctgagctcgccgaaggcgatggtatgaacccggacatggtggtcggcggcaagctttgccgccagttcaggcgacagctgcgaagcggtatcattgccgtcggtgagtaaaatcgccagcttatcggcctgcttatcggggccattttccagcaccttaaccgccacacccagcgcatcgccgatagcggtttgctggccaatcatacccggcgctagctgattgatgcgcatttgcagcgcctgtttatcttcgcttatcggggcgaatggccaggcttggctggcgaagattaccatgccgatgcggtcggattggcgggcggcgacaaacttgcgcaccgattgctgcaccgcttgcaggcgcgtattaccgccctgaacgtcatttttcgccattgacccggagacatcgaggatcagcacgatatcgcgcatcggcttgctgacgtactgcggcggcgtcaggtattccgggcgcgccagcgcgcagaccagcagcgaccagataagccagaacagcacggcgctggccccacttccgcgtttcggtcgggtatcgagctgtagcgcgtcaattagcgagggtaaaaacggtacccgcacgcgctcgtcggtggatttttccggtagcgggagaaaacgggtgagcagtggtagcggcaacagtagcgcggcccagggccaggcgaaatcaatttgggtgagccattcagacatgtggaagctcctttagccactgcgccaactgagcgcgaagccgcgccgtctgctggtcgttcagggcgttgtcggcccggcagtagcgggcgatgagctggtcgcgcaggtcagcatccagcgtcaatgacgccagcacggcttccggcgccagcgtttggctaaccgtctggcgcggctggtggaccaactgcacgcgtttaatcagctgcatccagctatcgacggtatgcggatgattgagcgccagcagcgcttctcgccgccaacggtcgcgccgccagcgggcgtagcggataagcagaaacagcgccgccaggctcacgacaatcgcgagcagaatcagccagcctgacggcagcggaaaccagctgggagcggggggcagcgcgggcgtttgtagctccggcaccgcatagcctttctcaaacattcaaagccccttttgtaactggcgcagcaggtcctgagttaccgtcagatgattaacccgaatacccaactggttgagttgctgctgctgacgcgccagccgaccgatgatgtgttgacgaatatcggcgctgagcgcggaggtgagggtgacgctggcgctgcgcccaccgtagcaggcggccagcgtgccggagcgcggcaggcgaagatgtaagtcgtcgaacagcacaaatgcgctgacctcgcagcgacgacgcagatgcgccagcagcgcctgcgctggggcgttgagatcgtgaaaatcgctgaggatagcgacccaggcgccgcgcggaatcgcgctgagcgcgcgctgtagcgcctgcgaaagcgtctgcgtacgctccggctcgagaggatactgctgcgccagtcgctgattgtaatgcgtcagatcatccagcagggcgggcagagtgctacgcggggcgcggcacgggtgtagcgccagcgtggtatcgttaaataccaggctgccgaggcgatcgccatcgtgatggctacgccaggctagcagcgcggcggttttgaccgcggcgcttgctttagtttgcccgcgggtggcgaaatgcatatctaatcgttggtcgaccagcaaaaagaccgggcgctcgcgctcttcattgtactggcgcacccacggcgtacgtagacgggcggtcgtctgccagtcgatcatgcgtatgtcgtcgccgggttgataacgacgcaggctgtcgaagttgagcccacgcccctgctggcgggaggcacgttcgccggacaacgcccccggcgggatctgtcccggtgggttaaccatcaaccgcgcctgcgacgcgaggtcgagcagcatctggcgattaacgcagaggtcgctcatcagatcaccacggcgttgagcagcatggcgatgacgtcgtcggcgctgcaaccatcggcgctggcctgatagctcagcatcaagcggtggcgcatcaccgccggcgcgataaaacgcacgtcttccgggcgaaccgcgtcacgtcccacgagccaggcctgcgcgcgggcgcagcgctccagcgctaaggtgccgcgtgggctcaggccgtaagccagataactagctaattgttcgctgatgtgctgcggctggcgggtggcgttgaccagttcgactatccaggtttcgataatcggcgcgacgtggatggcgcttatctcctgccagcaggaggcgatctcttgttggctgaactgcagtgattccgcttctggcgcgggggcggtttttgccgctacgccatatttcgcctgttgctcggcgcgaaccagctgcatcacctgctgctcatgctcttttgatggatagtcgacctgtactttcatcagaaagcggtcgagttgggcttccggtagcggccaggttccttcctggtcgacggggttctgcgtcgccagcaccataaacacgcccggcagcggccagcttttgcccgccacggtgacgtggcgctcttccatcgcctccagcagcgccgactgcacgcgggccgaagcgcggttgatttcgtccgccagaatcacgttgccgaataccggtcccgggcgaaaacgaaactgctcttcttcgcggctggcattttgctgataaatctcgctgccggtgatatctgatggcagcagatctggggtgaactggatacggcggaattcgccgacgatatgccgcgccagctcgcggacggcgcgggtcttcgccagccccggcagcccttcgagcaggatatgaccatcacagagcagggcgatgatcagcattcgcacgacgttttcctggccgagcacctgcgcattcatgcgctgctcaagctgtagcattttatcgcgaagattcatcggctaactcctttaaaatcgcgtttcaccagcgtaacgatgcccgccagaatcggctcggcatagttgaaaaaggctttaatgcccgggcagagatagttcaaaccggcttcgccgtcggtggtgagcaccagacggtttttcgggcactcgccgtggcaaagcttcaggtaagggcactgcttgcactgctggggcagcgtgtcgcatttacccataccgaaagcctgctgacgttcggagaaagccattcgcgccaggctgttatcggcgatattgccgatttgatactccggatagacgtagtggtcgcaggagaaaacatcgccgtttttctcgaccgcgagtcctttgccgcaaaactccgcggtggtacaaatttgcgctggcagacccatcatctgggcgacggcagtttcgaacagattgacctgtacgcggccaagatcgttgttcacccactcttcgaaggtggctatcaggaagcgtccccaatcgtccgggtcgaccgaccagtcggtgacgatagcgtctaaatcgccggggcgcgcgcggcgactgccgacggtggggatactgtcatcacgccagaaatgaggcgcggtctgggtaaagtccaccggttcgacgcaggggttaaactgcacgtaggtcgcccccagttcgcgggtaacaaagcggtaaacttctaatgggaaacgggcgttggtgcggttgactgtgaccagcgcattgaatggaacgccatggcgtttcagagcgtcgacgccggccatcactttatcaaatgtcggtttaccgctgcgggtgatgcgatagcggtcatgcaactctcgcgggccgtcaatcgacaagccaacgaggaaatgatttgctttgagaaattcagcccaggcatcgttaatcaggataccgttggtttgcagatcgttttcgatccgctggccgggctttttatattgctgctggaatttcactactttgtggaaaaactccagccccatcagggtcggttcaccgccctgccaggagaagactacctgttcgccatcctgtccgtcgatgtactggcggataaagttttccagcgtttcatcgctcatgtagcggcgtttttcctgctggagcaagtgttctttgtgcaagtaaaagcagtagctgcaatcgatattacaggcggagccggtgggtttcgccatcacatgaaagcgacgttggtaagcggggccgttacccgcgtacttttctgccgaaggtaatgcgttaacaggcacggtggtgctgtgtttcataaataactcccggattagtcaggtcgagggtaaagcgaggagaaaaacagggcggcgaaccgccctgggagatggattaccgttacttgccggtttttgcgctctggtcgagcatggcgctaacatcggagacggtaaaggaacccggcttctgacgcggcgggaattctttaaacgtcgccagcatatcttttgccgacttctgcgcgccgcccagcaggaacagacgatcgtagaaccaggtgtcgtagcccatgccgtcggaacctttctccagtggatcgactttcagatcgaagatcagcggagtacgcagtttggtgaacggatagcgccacagatcgaggccggtgtgctcctggatcataaagtggatcttccagcggccctgacgcatcgccagcagatcgccgtcatcgctccagtagaagaattcgttacgctggtctttccctttaccctgcaggaagtcgagctggttatagccatcaaggtgaaccttgtaggtgatggacggcgttttataccctttcagcatttcctgtttgatgttgctgtcgccggcagcggcaaccagcgtcgggaaccagtcgtagctggcgaacatgtcgttcaccacggtgcccggtttgatgtggcccggccacttgatcatcgccggtacgcggaagccgccttcccagccggtgtttttctcaccacggaacggggtttcgcctgcgtctggccaggttgcggtcatcgggccgttgtcggtggtgtagataacgatagtgttatcttcgatgccgaggtctttaatcttctgtagtacctggccgacaatcttgtcgtgctcaaccatgccatcggcataggtccctaacccggtgacgccaacgctgtcgtctttgaggtgggttttgttgtgcatacgggtggtgttgaaccaggtaaagaatggcttaccggctttcacctggcgcgccataaagtcgttgttggcggccagggtctcttcatctacggtgcccatacgcttcacggtcagcggaccggtatcttcgatcttgccgtcagcggtactcttaatcacgccgcgcgggccaaactgtttgcggaagttgggatctttcgggtaatccgggttttccggctcttcttcagcattcagatgatagaggttgccgaggaattcatcgaaaccgtgcgcggtcggcaggaattcatcgcgatcgccaaggtggtttttaccgaactggccggtggcgtaacccagttgcttgaggacgttggcgatggtcggatcttctttctgcagaccctgcggcgctcccggcataccgactttactcatcccggtacggaatggcatctggccggtaatgaaggcggaacgacccgcggtggagctctgctcggcgtagtaggaggtaaacttcgcgccctgggcggcgatgctgtcaatgtttggcgtctggtagcccatcagaccctgattgtaggtgctcaggttcaggtagccgatatcatcgccaaagataactacgatgttaggctttttagcatcctgcttcggcgctgcggcgtcggctgcgtgagcaacagtcaccgcgccggaagctaatgtcagcatactggccaacattgttctcttaaagggaatatttttaaacatagctcgctatccttttatttttccggatgtttaaatgatctggaaaaatagattgttaacgaagcgtctaatttatttttaaattagcaagggtgttttttattaaaaataaattagacgcttcagtgggcgaaaccgtgttacggttctcgtcggtgttggcattttatttagtcatctagctcgatacgagagtagagtctctaaacggactgaaataaatggcaggatgaactaaaaatgctatctttaattgacagtgttaactttgtcagactatttttctacatgtttaaataaatgataattaatggggcaacatgagaacgacttattccgatgttattgatcaatataaccatgttgtcaccagcgaccttgagttgattcaacctctgatctcggcaaatcagccacgaatcatcaaagacaacggcgttttcagaattgagcccggcgaaatcgttattatagttgaaggcattattgcgatagaagtggaatacaacgtgggctttggttccgcgattaaacgcggcgcgcggagtaaaacgctggacatgttgcagatcggtaaagggatccgcggtatgatctttgggattattgaaagctatggtccggcgctatcgctaaaatatacggcgaagaaaaatgtcaaaatagtgacctgcagtaaagaagcatttgaacactattttattcaacgcgatcggtttgcttatctgatggaaatcatggcgtttcagctatcgctgattattgatgcgcatcacgaaaagaatttaccttcacgctacgatacgattaagtcaatgatttaccgttacaaaaaacagcaggatgcgggagtattacatgatagaagcctggctagctttattctgaaaagaaccaaaatgtcgcgcagctaccttttcaaaattcttgctgagcttaaagaaggggatatatcaaaatggagaacggtgagctggtcgatattgtgcacgagctaccggaaaaattttaacctgctttcagggttgaagagaccgtctaacagatccagggattactttactcttcattacgcttgcccgccgggcgacgaatcatgtttgccgaagccagttgccgtgcggaatcttgcccgtcgtgtttcttttaccacgatgagaatggagagacaaaggccgtttgttggtttgattttgtctgtgtatatctctaaaatgcagttaattattctgtaataaattcatcctactagtgaaataaaccattgttttttcgttttaagggatacgattttgctgagaagggaggcttgtttgtgttcaatggtacagcgcgctctgacgtgtacaatttcgttaatatagaaaagggcaggcgcggtagaaagagtcagccgtttatctctttctccaaaaacggggggcatgtcaggatcgcggctttcattgctcgtcacggagaacatgttgatattcaaatagattactccaccagaaccatccgggttaagaaggtggaacaccacggtgtgcgtattaacgtcggcggcgtctttacccgtaaggtactggtgaaacagtttctgtttggcgagaagaagactatccgcgtcgatctcacccaacaggacgatggctggttttatggcgacttgccggtagagttcacggccaattgcgcatagtgcgtcattgcctgaattagccattatccaactatgttgatacggagatagcggataatggcttttttatatcaatgagatataaatacgagtcattatagtttcgtattaataatttatttttaagtaaataagtaccattaaagtctattaaataatagttatttccaatgatatctttgcaataattaagggaaaatagaaactcaaaaaaggaaatgataattaatggaaaatttactcagacattgtgaacaggttgtagttggcccctatagccgcgatgcccgggcgctggcgcatgaagtgatcgataccatctcggcgggcgttccgccggagcagctgattctcccctggatgtcggttaaagaagcgctgcccgacgccaatagcggtcgctacgtgtgcgcttatacgccagcgaaatctcaggaccgccgctatcagctggtctccgctgccatgttccgcaccgtttgtcaggacgccacccactggttttatatgtgggaagcgctgtgatggtgggagggggctgatttttgtattggtaaatgtgattttgtatttcgtgagtagattccttcttaatttcattgcgaaaaaaactatttaatacaatatgttgtaatattttttttagtttcaattcatcaagatgagatgtatattctcacattacatgttatcagagatgttttttatggatgcaaaacagatagctcaagggatagttgatggcttagcgtcgataccagaaagtctttattttactgttgtgaggacgatagagggggctggtattgttgagcgacaatacaaaaggcgaaatgaaatcgaaaacgagcgattctttcgtgtattaaaaagtttatcttcgaatgaggcacctattaggcagttagttactattgttatatctgatttttataataagttagatgataatactaaaaaactaataaatgacagattaagttatgctgattctaaattgggaagtcgaattggagctcaggcattcataactcaatatctggcggaagggattattagtagattgagaatgagtaaactaatgcgacgagttactcgcgtagcatcagctgttaccttgaacattataatggtccaaggtttgatcgaggaagccgcgcgagcctctcgtagattaagaacccactatgctgaaacctactttaaggtttcacctatgaacctggatatggtttacttccttgttgaagcggatctggagccttatttgctttttattaatagccatccggtacagtgcaagggtattgaacatgaaatctgcaaaatcctcactcgctaatatttgcaaatccatcgggattcagtccgcgagtctgctggaagctatcacaacctgcctttgttctatcgccgcgctgggtagcctttttgtgcttgaaggctggggcatgaagatggctggttttgtcgggtttttggcgctggcttacgtggttgcctggatagtggatatagtaaaaggcgaaaagtagagccaaacattttgattcattactcagattcttgagatttggacggattggacttatcactatcagaggatcttttttgccggagggtgtgagcacatgtaagaggggctgccagataaaaaatcagccatttgtgcatagctcacatttgaacaattaaatggataaaccttttgatacttaagcaaaatatagtccatattatagccttgtaccgaacgtggatatttaaggataagactatgtcagcagtaattgataaagcactggattttattaatggcatgaacacgtcatcttcagctccgcacaccatggatgaaagtacggctaaaggcattttcaagtatcttaacgagttaggagctccggccagcgcagctgatgtatatgcccggggcactcaagagggctgggatcctgaatttactaaaacgttagctggatgggcggaacgaattgagtccggcgagcgtatagttattaagaatcctgagtacttttcttcttacatgcgcgaggaactgcgggctctggtataagatgaactctgctcaaccgtgagcggactggaatgcgttgcgctttcgctatattgcaagcttctaacccggcgcgtttatactccgcagtacttgcctgccgtattctgtaggtatcctggaaaagactaagggcttacgagtaatcgtaagcccttgatatttggtggcccctgttgggtttgaaccaacgaccaagcgattatgagtcgcctgctctaaccactgagctaagggccgtggcgagcgattataatgtaactgcacgctgcaatccagcgtaaagcgctcggctgctgtttttataaacaatgcattttcaatcctttataatcagctttttagtcattcagccggagaaattatgattagcgatatcctggcgccggggctgcgggtcgtcttttgcgggatcaatccggggaagtcctccgcgcatacggggttccattttgcccatcccggcaatcgattctggaaggttatttaccaggcgggtttcaccgagcgacagctgaagccggaagaggagcagcatctactggataccggctgcggtatcaccatgcttgttgagcggccgacggtacaggccagcgaagtcgccctgctggagttgcgtaatggcgcgcaggagctaataagcaaaatccaggactatcagccgcaggcgctggcggtgctcggcaagcaggcctatgagcaggcgttcagggtgcgtggcgcgaagtgggggcgccaggaggcgaccatcggtgaaaccgaaatctgggtactgcccaatcccagcggtttaaaccgggcgacgctggacaagctggttgaagcctatcgcgaactggatgaggcgctggcgggcgagggcggtgatggcgcccgatagcaggcataaaaaaagctccccgcggggagctttttactctctttgcagcgcgacgattaatcgtcgaggaagctacgcagcacttcagaacggcttgggtggcgcagtttacgcagcgccttcgcttcgatctgacgaatacgctcgcgggtaacgtcgaactgtttacccacttcttccagcgtgtggtcggtgttcatgtcgataccgaaacgcatacgcagcactttcgcttcacgagcggtgaggcccgccagcacgtcgtgcgttgccgcacgcaggctctcggtggtcgcagaatccagcggcagctcgagggtggtatcctcgatgaagtcacccagatgcgaatcttcatcgtcgccgatcggcgtttccatggagatcggctctttggcgattttcagcaccttacggattttgtcttccggcatcagcatgcgctcagccagctcttctggcgtcggctcgcggcccatttcctgcagcatctggcgggagatacggttgagcttgttgatagtctcaatcatatgcaccggaatacggatggtgcgcgcctgatccgcgatggaacgggtgatagcctgacggatccaccaggtggcgtaggtggagaacttgtagccacgacggtattcaaacttatctaccgctttcatcaggccgatgttgccttcctgaatcaggtcgaggaactgcagaccgcggttggtgtatttcttggcgatagaaataaccagacgtaagttcgcttcaaccatctctttcttcgcacgacgggctttcgcttcgccgatggacatgcgacggttgatatctttaacctgctcgatggtcaggccggtttcttcttcaatctgctgcagtttctgcaggccgcgctgaacgtcttctttaacgtcatgcagcttctcggaccacggcttgttcatcgccacagcggcgttgaaccaggtttcgctggtttcgttgccggtgaacagggtgatgaagtttttcttcggcattttgcactgttcaacgcacagcttcatgatgatacgttcttgagtacgaacgcgatccatcatgctgcgcatgctgttgaccaggtaatcgaactgtttcggcaccaggcggaactgtttgaagacctcggacagcttgaggatctcttcctgcgcggcggcgtggctgcgacctttcgctttgatggtgtcgcgagtcagctcatactgggtgcgcagctcggcgaatttctcgcgggccagctccgggtcgatgctgttatcgtcatcgctgttgtcgtcgtcatcatcttcttcttcatcttcgtcgtcgtccatctcttcctgagacagctcggaaccgacgtgagtggcggtcggcgccatatcttcttcagcgttcggatcgacgaagccggtgatcaggtcagacaggcgagcttcttcagcttcgacacggtcatactgctccagcagataggtgatggcttccggatattccgcaacggagcactggacctggttgatcccgtcttcgatgcgtttagcgatgtcgatttcgccttcgcgggtcagcagttcaacggtacccatttcgcgcatgtacatgcgcaccgggtcggtcgtacggccaatttcagattcaacgctcgacagcacctgggccgccgcttcttctgcgtcttcatcggtattattggaggtttcagcaagcagcagatcatcggcatccggtgcttcttccatcacctgaatacccatgtcgttgatcatttggatgatgtcttcgatctgatcggagtcgacgatatcttccggcagatggtcattgacctcggcataggtcagatagccttgctccttaccacgttggacaagaagcttcagctgtgactgcgggttttgctccataagacggtatccacacttaattcgtttgattggtgcaggcagacgaactgccaacatttaaagcgagggcgtacttatattattgccgctgcgcctcagcgcggctgtcgggggcttcccgatcgatattcggcacttaagccgttaaattcatttttttgccagttcctgactgatagtccagagttcccggcgctcctcactgcttaaaccatgtgtgcgatcgcgagctatcaactcttcttgtcgcagttccagcagtgagtcaaacatatggttgagcgagtcggtgaaggtttgttcagcgatatccttatctgctatatcgtcccacatcgacagtttttcaagggttgccgcttcatttgtcccgcgatactgctctaaaagctgcccggtggtcagacctggctgagacagacacgtattgaccagttcgctgaataaaccaagccctggcatcttctgctgatccagacccgtcaagggcggaaccagcggcgccagatcggggttctgcaccagtaaccctataagtatacgcatggtcgtgcgttttagctgcggcgcagggcgttgggtgctattttccgcctgtttcggcattaaacgttcaagctgggcgtcatccagaatgcccagtttgttacccagctcctgacgcaaatagatgcgcagcgtttcgcccggcacctgggttatcagcggcagcgccagcgtgctcagctgcgcccgtccgtccggggtgctcaggtcgacctgcggcatcaggctattgaataaaaacgtggagagcggctgtgcctgctccatccgcgcttcaaacgcctctttgccctctttacgcaccagcgtatccgggtcttcgccatcaggtaaaaacataaaacgcagttggcggccatcggtcatatacggcagcgccgtttccagcgcgcgccatgccgcgtcgcggccagcccggtcgccgtcgtaacagcagatgacctgattggtcgcccggaacaacagctgaatgtggtcggcggtcgtcgaggtgcccagcgaggccacggcataattaatgccgtactgcgccagcgcaacgacgtccatatagccttcgaccaccagcaaacgctgaggttcggcgttatcctgctgcgcttcatacaggccgtacagctggcggcctttatggaaaatatcggtctccggggagttcaggtattttggcagcgcatcgcccagcacgcgcccgccaaaaccaatcacccggcctcgcttatcgcggatcgggaacattacccgttcgcggaagcggtcgtaactgcgcccctgatcgttggtgaccagcatgcctgcatcaataagcgactggcggttttcctgattgccgccaaaacgttttaaaacgttatcccagccaggggagcgaagcctattgcgaagcgggtaatcacctcgctgcttaagccgcgttttgccagatactggcgcgcgggttcggcggcgggttggttcagagactgttggtaaaacgtgttcagaccgtccagcagctgatagagattttgccgctgatgccgttctatctggctcggtccattacctgcttcatagggcacttcaaggttgtgcatggcggccagctcttcgacggtttcgacgaactcgagcttgtcgtagttcatcagaaagtcgatagcgttgccgtgcgcaccgcagccgaagcaatggtaaaactgtttttcaccgttgacggtgaaggagggggttttttcgttatggaatggacaacacgcgtgataattcttgccctgctttttcagcttcacccgagcatcgatcagatcgatgatgtcggtgcgcgccagcaggtcattgataaatacgcgtgggattcgtccagccatatgccccgtaatctatacactgcatcctgcaaacggcctcgatgtattgcctgaagacagtttgaacgatctcgtgtatctgctaatgcataaacgaaaataagccgcgcattcctttcggaagcacggccttacaactacaactcggtctgaattgagagcttcgctctcaacagattagtacagacgagtgcggcgtgcgttttcgcgagccagtttcttcgcgtgacgtttcactgcagaagctttagcgcgcttacgttcggtagtcggtttttcatagaactcacgacgacgaacttccgccagaacacctgctttttcgcaggaacgcttgaagcgacgcagagctacgtcgaacggctcgttttcacgtactttaattaccggcatgtgcctctcacctttgattaattcggtttgccgctggccgcaatgccagcttatttcaaaatggtgcggaattttactgcaactactgctgctttgtaaagcaccggcgccttttttgaaaggggacttttataagggtgaggagtatacacgaagagaacaccaggggtgagcaaagttttacatcgccggtcattggtcctacactgcgcggtattgaaacgaggtaaaacaactcatgcgtgtactgggaattgaaacatcctgcgatgaaaccggcatcgctatttacgacgataaacaaggtctgttagccaaccaactgtatagtcaggtgaaattacatgctgactacggcggcgtggtgcctgaactggcgtcgcgcgaccacgtacgtaaaaccgttccgctgattcaggcggcgctcaaagaagcgggcctgacggcgaaagatattgatgccgtcgcctatacggcaggccctggcctggtgggcgcgctgctggtcggcgcgaccgttggccgctcgctggcgttcgcctggaacgtgccggcgatcccggtacaccatatggaaggacacctgctggcgccgatgctggaagataacccgccggcgttcccgttcgtcgctctgctggtttccggcggtcacacccagctgattagcgtcaccggcatcggccagtatgagctgttgggcgagtcaatcgacgatgccgctggcgaagcctttgataagacggcgaaactattggggctggattatcccggcgggccgatgctgtcgaaaatggcgtcccagggtacggaaggccgcttcgtcttcccgcggccgatgaccgatcgtccggggctcgatttcagcttctccggtctgaaaacctttgccgccaataccattcgtaacaacggcgacgatgagcaaactcgtgccgatatcgcccgcgcatttgaagacgcggttgtcgatacgctgatgattaaatgccgccgtgcgctggagcaaaccggctttaagcgtctggtgatggcggggggcgtgagcgctaaccgtacgctgcgcgcgaagctggcggaaatgatgagcaaacgcggcggcgaagtgttttatgcccgtcctgagttctgtaccgataacggcgcgatgatcgcttacgccgggatggtccgcctgcagggcggtgctaatgccggcctcggcgtcaccgtgcgtccgcgctggccgttggcggaactgccggccgcctgataaccacaaagaaggaaaaaccacgctttttccttctttgtcagcagactgaagccgcccatcgaggcggcttttttacgcgtggattaaggctgctgataatcctcggcgtcgatgtcgtagccagacggctcccagcggatagccagcagcgacaatagcccaatcagcggcgcggcggcgatgatccagaagacgcgggtatccagcgcggcgaccagcagcgggaaaaggaataaagaaagcgtcgaactgccgcgcataagcgtctggttgagaccgacgccgacgccgcgcagcgatgttggatagcttaatgaggcgaaggtcatggtgtgcgcgccggggccgaatccctggccaaaaaggaacagcgccagcatcgccacggcagcgacgccttcacctgcgccatcagggcggccaatcagcgccaggccgagcagcgccgtcagctggcagccataacccgccagcgacatccgccaggctccgaagcgcggcaccagtcgtaccgccagcatccctcccacgaaagcgaacagcaaattcagcgccagcgaaatcaaaatcgtcgtcagcatcgattgcacgaagaaactggagatgatcaccggcagaccgaacgcgacggcgttataggcaaacgaggagacaaccgacagcagggtggagagcgtcgtgcggcgcaggtagacgccgcggaacaggcgcagatagttactccattgggcgctacggactttcggcgccggtttttccagcgcgtcctgggctacgtgtgcattgatgttgtacgcctggcgtagaatagacgcagcttcacgcaggttaccctggttggcggcccacaccggcgattcgctcatatagcggctacggatagcgataatcaccagcgccgggatagcgccaaaaccaaggataatccgccatagccagtcgctatggctttccggcaggacggcataaaaaaagagtaccagcagatatgaaatactgatcgccgcgtaccacgtcgggcaccacatcgccacgctggccgccttgttgccgggacctttgagcttcgcgaattcgctgagaaacgccatcgccaccggcaggtcgatcccgacgcccaggcccatcacgaagcgcgcaccggtaaggacgtattcattcggcgccagcgcgcaggcgatggccgccactacgaagaacagcatatccgccataaacacgcgatagcgaccaattttgtcggtcagataaccgccgagcaacgcgccaacgatagcgccgaaggtgatggccgaggcgaccatcccggtaccggcaggcgtcaggttgaattcccgggtgatatctttcagcccgaaggccaacgagccaagatcgtaggcatcaaggaaaataccgccgagggcgattcccatgactatacgcgcgttattgcgcccgctgctgccttcattgatgaggcgcgagacgtctgccgcgctgccgatccattttacttccccgccgggcgacgcagagcttgccgcgggcgtcgcgttaattacatcagtcatggtgttgtgctttttctcttataaagagcttcagagtaaacagcgacgcgggggcgaaaaaatcacttttggttataactcataactaagttattgtagtgaaaggattatcttcggctttctcatttgccgctatgattggctaaaaaaatggaaaatagaatgtgtttgtggcggcaaagcggcccggcgcaggcggccgggcgcggagattatttctgctctggcgtttttttcttcttcttaaagcgtgaccagattttcgtttcctgacggcgccacagacgctggatattgtcgtgatggcgtagcaggatcaggcaggagagcatggagaccgggaaggtgtactgcggtttgaaccaccagacgtagaaaggggctaccagcgcgctgacgatagcgcccagcgaggaatacccgctgagcagaatagtcagcagccaggtgccggccattacgccggtgagatcccagccgatgggcgcgatagcgccaaatgcggttgccacccctttaccgccgcggaaattaaagaacaccggccagatatggcctacgcaggcggcgatcgccaccagcccgagccagaacggcgtcagaccgagcgcccaggcgccccaaaccggcagcatccctttcaggacatcaaaaattaaaaccgttacggctgctccctggccgccaattcggagtacgttcgtcgccccagggttgccggaaccgctatcgcgagggtcgggcaaaccagcaagacggcacaccagaatggcgctggaaattgagccgcagaggtaggcgaggataactagtccaggcgcgattgcactcatcagctgttccattttgaaaacgtcgttagaaccccacccattttcgtgttaacagcttgttggctttctctgcgcgataggttacatagtgatgctgctatgttcccgtaatcttgctgcgtcgccgctgtcagggcacgtgaattctttaggggatgtctttgcatctgtggataatacgcataattcgccggaagtggtatccggtttagccaaaaagcaggcaggtcgtgatggatattgtatttatagagcaactttcggtaatcaccactatcggtgtttacgactgggaacagaccatcgaacagaagttagtgttcgatatcgaaatggcgtgggataaccgcaaagcggccgccagcgacgatgtgagcgattgtctgagctatgctgatatcagcgagttggttatcaaccacgttgagggcgggcgtttcgcgctggtcgaacgggtggcggaagaggtagccgatctactgctgcaaaaatttaattctccgtgggtgcggattaaagtcagcaagcctggcgcggtggcccgtgcggccaacgttggcgtgattattgaacgtggcagtaatctgaaacaaaacgtttctcgtcataatgtttaaacaaatttgttttataccggtcttagtgcctggattttaattttactttttattttaagggtttattgaatgggcgatttacactcgctgctaatagcggcaattttgggtgtggttgaaggattgacggagtttttaccggtttccagtacgggtcatatgattattgttggccatctccttggttttgaaggggataccgcaaatacttttgaagtcgtgattcaactaggatctattctcgccgtcgtcgtggtgttctggcgtcgactgtttggcctgatcggcattcattttggccgtcctctgcagcatgagggcgtaagccaggggcgcttgtcgctgattcatatcctgttaggcatgatcccggcggtggtgctggggctggtgtttcatgacctgattaaatcgctgtttaacccggttaacgtcatgtacgcgctgattgtcggcggcttcctgctgatcgcggcggagctattcaaaccgaaagagccgcgcgcgttgggtcttgacgacatgacctatggtcaggcgtttgccatcggttgcttccagtgtctggcgctatggccgggcttctctcgctccggggcgaccatttccggcggcatgctgatgggcgttagccgctatgcggcatccgagttctcattcctgctggcggtaccgatgatgatgggcgccaccgtgctggatgtttacaaaagcatcggcttccttaacgccggcgatatgccgatgttcgccgtcggttttatcatggcgtttatcgtggcgctgatcgcgattaaaaccttcctgcaactgattaaacgtatttcgtttatcccatttgcaatctaccgctttatcgtcgcggcagccgtttacgtggtcttcttctaaggccagggccctcagccttgcggctggggcaacgttgttctttccactgccccacggctgcaattctgcgccgcgtcagctcctggcgaatctccggccctttgaaaccttccgctaccacttctttagtggaaaccgacagcgccacttcccaggcttcaagcagcaggcgtccctgcggataatcgcaggattcaaaaccggtgcgcccgcgcacgtcggcctcgctggtgagggcgatttgctgtactcgctgcggtttgcgccaggcatcgatgctatcaaatagcttcacgatggtttttggctgcagaatcggcagggtgtggatcagatcgtggaattcggcgaccagtctggccagatcgcgaatatcgttcggcacccgcaggcgctggcaaatttgttccaccagcttcacccccgccgggccgtggccatggtggcgcggccagaactctttgggcgttaagcccttgccaagatcgtggcacagggtggcgaaacggacgtcgatggccggcgatagcatcgccgccatggtgagcgtcatcagggtgtgaacgccggtgtcgatttccggatgccatttggccggcgcggggacaccgtacagggcgtcgatttccgggaacagaactttcagcgcgtggcagtcgcgcagggtctggaaaaagacctgcggattacgcgtgccaagcgcgttttccgtctctttccatacccgctccgccgtcaaatgcgccagttcgccggcgtccgccatcgcgcgcatcagcgccatggtttcatcggcaatgcgaaaaccgagatgggcataacgtgcggcaaaacgcgcgacgcgcagtacgcgtagcggatcttcgctaaaggccggggagacgtggcgcagcaggcgctggcgtaaatcggcctggccgccatagggatcgtaaatctgaccgtcagtgtcctgagccagcgcgttaatggtgagatcgcggcgcagtagatcttgctcaagggtgacgtcagcggcggcataacaggtgaaaccggtatagccggaaccggatttacgttcggtacgcgcgagggcgtactcttcacggctttgcgggtgaagaaacacgggaaaatcgcggcctacctgctggtagcccgcgtcgagcaactgctggggcgtggcgccaaccaccacccagtctctatctttgaccggtagtcctaataacgcatctcgtaccgcaccaccgaccaaataaatcttcacgcctgtttctcccgcatcgacttttcgcaagatgatacgtaagtctggcagagaagacgaattagttcatccaccggtctttacgcttgcggctcggtaccagatgcggcaacaccaggccaaggatcagaccgacgccaagcacgccgccgccgtacatgaaccactgcatgataatggtgcgctgtttatcatcaagctgaagattcgccgcgttcaccttcttctgagcgacaaccagctcgtttttcagcttttggttctcttctttcagggcgttgatcgcgccatcgctaccggcgacttttttctgcatgtcggcggtacgctggttccaggtggcgtcaatgttgttcagcttgtcggtcagcgttttgacctgattttccagatccggcacgcgaatgcgcaggctgggctcgttgctcagctctttcagcgggatccaggcggtacggccgttgctatcgcgtacctgcgcgtaattcgtgctgtcgttggtttgcagaacgtcgacggcttcgccggcgttaatggtgccgaccagacgatagttatcgccaggaccgctgcgaacccaggtgctcagctcatcggaaacgtagcgcttttcttctgcgtgaaccgccgtagcggcgctaagcgctagcaatgtaaaggtaataaggcgtaattttggcatcaggtcatcgtttggtcataaaaagttgaacgatagtagtggcatcgccagagcgacgcaaagttttccgccacaatcggaatcatccaaatgcagctggcaaatgcgcattgcatggcgattcgccgcaaaatactatttactgacaaaaaatatcgtcattagttcgccgcattttcccggcgacgcttatcaggtggaagaattcagccatggctcaagaaatcgaactgaagtttatcgttgcccacgacggcgttgagacgctgcgccagcatctcaatacgctggattcgcagcactcgccggcaggccaactgctgaatatttactacgaaaccgccgataactggctgcgccggcacgacatggggctgcggatccgcggcgatcgggagcgttatgaaatgacgctgaaaattgccggtcgggtggtgggcggcctgcatcagcgtccggaatacaatattccgctggaaaaagcacagctggcgctggataaactgccgcctgaggtctggccgcaggggcagttgccggcagaactggcgcaaaatgtgcagccgttgtttagcactgatttcctccgcgaaaaatgggtggtgaaagagggcaacagccagattgagatagccctcgaccttggcgaagtgaaagccggtgagcatcaggaagccatttgcgaactggagcttgagttgttgagcggcgataccgccgacattctggcgctggctgggcgtttactggcaaccggcgtattgcgccagggcagcctgagtaaagcggcgcgtggctatcaactggcgcagggcaatgaagcgcgtccggttaaaccgttaacggtagtgggcgtggcggcgaaagccagcgtcgagcaggggctggaagcagcgctggaaagcgcgctggcgcactggctctatcatgatgaagtctggaaccggggcaacgcggcagctaaacgtgaaatccagcaggcgatggctcgcgttcgccatgcgctggtgctatttggcggcattgtgccgcgaaaagccaccgtacagttgcgtgaatcgctcactgaggccgaagcggcgctggacggagcggagaaagccgaagcggcgttgttcaaccgcgccacggttggcgccaaactgctgctgaccgaatggctggttacccgcggttggcgttcgttcctcaacgaggcggggcaaaagaaaatcgccggttcgttcaagcgctttgccgatatccagctgtcgcgagcggcggcggagctgaaaagcaacttccagcagacgcaggacgactacagcgatcggctcacgcgtctggcgcgcgagatcgacagcattcaattgctttccagcgcctatgccggggtagccgaggcctggctggaaaactggcaagaggtgcgccgcgctatcgagaacaatgaccgcagcgtcatcgaatatttccgtcgtcaggcgctggccgcggaaccattctggctgcatagtggaaaacgataatttcaggccagggagacccctataatggcgctttcttcgcagttacagcagcactggcagacggttgtaaaccggcttccggcagattttcccctgcaaacgttaagtttgcaggcgcagtcggtgatgacattcagcgagttcgttgaacagaatctggtcgctcagccgcagtggctggctgaactggaaagcgcgccgccccaggccgacgaatggcgccattacggcgactggctggcggaacagctacaagacgtgactgacgaggccgcgctgatgcgcgagctacgccagttccgccgccggatgatgttgcgtatcgcctgggctcaggcgctgctgctggtgagcgaagagagcagtttgcagcagctcagcgccctggcggagaccttaatcgtcgccgcccgcgactggctgtacgccgcctgctgccgggagtgggggacgccgtgcaatgcgcagggcgaagcgcagccgctattgatcctgggtatgggaaaactgggcggcggcgagcttaacttctcttccgatatcgatctcattttcgcctggccggaacacggcgctacccagggcggacgccgcgagctggataacggccagttctttacccgtctgggccagcggttaattaaagtactcgatcagccgacgcaggatggtttcgtctaccgtgtggatatgcgtctgcgaccatttggcgacagcggcccgctggtgttgagctttgcggcgctggaagattattaccaggagcaggggcgcgactgggagcgctacgcgatggtaaaggcgcggatcatgggcgataacgacggtgtgtacgccaatgaactgcgcgccatgctgcgcccgttcgtcttccgccgctacatcgatttcagcgtcattcagtctctgcgtaatatgaaggggatgatcgcccgtgaagtgcgccgccgcggcctgacagacaacatcaagcttggcgcgggcggcatccgcgaaattgaatttatcgttcaggttttccagctgatccgcggcggtcgcgaaccggccttgcagcagcgcgcgttgctgccgacgctggcggcgattgacgagctgcatttgctgccggaaggcgatgccgcccagttgcgcgaagcctacctgttcctgcgccgtctcgaaaacctgctgcagagcattaacgacgagcaaacccaaaccctgccgcaggatgagcttaaccgcgcgcgcctggcgtgggggatgcgcgtcgccgactggcagacgcttagcgcacagcttgaagagcaaatgcgtcgcgtgcgtcgcgtctttaacgagcttatcggcgacgacgaggcgcaatcgccggatgaacagctggaagagtactggcgcgaactgtggcaggacgcgctggaggaagacgatacaacgccggcgctggcgcaccttgacgacaacgaccggcgcagcgtgctggcgctgatcgccgattttcgcaaagagctcgaccggcgcaccatcggcccgcgcgggcggcaggtactcgaccaactgatgccgcatctgctaagcgaagtctgctcacgggcggatgcgccgctgccgctggcgcggatcaccccgctgctgaccggtatcgtcacccgtaccacctatctggagctgctcagcgaattccccggcgcgttaaaacacctgattagcctgtgcgccgcttcgccgatggtcgccagccagctggcgcgccacccgctgctgctggacgaactgctggatccgaacacgctttatcaaccgacggcgaccgatgcgtaccgcgatgaactgcgccagtatttgctgcgcgtgccggaagaagatgaagaacagcaactggaagcgctgcgtcagtttaaacaggcgcaattgctgcacatcgccgccgccgatattgccggtaccctaccggtgatgaaagtgagcgatcacttaacctggctggcagaggcgatgatcgacgcggtggtgcagcaggcgtggctacagatggtcgcccgctacggtcagccgactcacctgcgggaccgtcaggggcgcggttttgcggtagtgggttacggtaaacttggcggttgggaactgggttatagttccgatctcgatctggtcttccttcacgactgtccgatggaggtgatgaccgacggcgagcgggaaatcgatggccgccagttctatctgcgccttgcccagcggatcatgcatcttttcagcacccgcacctcgtcgggcatcttgtatgaagtggacgctcgcttacgtccatccggcgcggcgggtatgctggtgaccaccgccgatgccttcgccgattatcagcgcaatgaagcctggacctgggagcatcaggcgctggttcgcgcccgggtggtgtatggcgacccggcgctgcagtcgcgctttgatgcgattcgccgcgatatcctgaccacgccgcgtgaaggcgcaacgctgcagaccgaagtacgtgagatgcgggaaaagatgcgcgctcatctcggcaataagcagcgcgatcgctttgatatcaaagccgatgccggagggatcactgatattgaatttattacccaatatctggtgctgcgctacgcgcatgaaaagccaaagctaacgcgctggtccgataatgtgcgtattctggagctgctggcgcagaacgacatcatggatgaggacgaggcgcgggcgcttacccatgcctacaccacgttacgcgatgcgttgcaccatctggcgctgcaggagcaaccgggcaacgttgcgccggatgcttttgacggcgaacgtcagcaggtaagcgccagctggcagaagtggttgatggcttaactaacaaagcgggtgtgctattatcgcgcgcaaagtttgcatctcgcaggagagagtaatgaaagtaacgctgccagagtttgaacgtgcaggagtgttggtggtaggcgatgtgatgctggaccgctactggtatggccctaccagccgtatttccccggaagccccggtgccggtggtgaaggtggaaaatatcgaagaacgccctggcggcgcggctaacgtggcgatgaacattgcgtcgctcggcgcgacttctcgtctggtcggcctgactggtattgatgatgccgcgcgtgcgctcagtaaagcgctggctgacgtaaaagtgaagtgtgatttcgtgtcggtaccgacgcatcccaccatcaccaagctgcgcgtgctgtcgcgcaaccagcaactgatccgcctcgattttgaagagggtttctccggggttgatccacagccgatgcatgaacgtattcagcaggcgctgggttcaatcggcgcgctggtgctgtcagactacgcgaaaggcgctctgaccagtgtgcagaccatgattaagctggcgcgggatgctggcgtaccggtgctgattgatccgaaaggcactgaatttgaacgctatcgcggggcgacgctgctgacgccgaacctgtctgaattcgaagcggtcgccggaaaatgtaaggacgaagcagaaatcgtcgaacgcgggatgaaaatcatcgccgacttcgagctttctgcactgctggtgacgcgctccgagcaggggatgacgctgctgcagccgggtcgtccgccgctgcatatgccgacccaggcgcaggaagtgtatgacgtcaccggcgcaggcgacacggttatcggcgtgctggcggcgacgctggcggcgggtaacaccctggaagaggcctgctatttcgctaacgccgcggccggtgtggtggtcggcaagctggggacgtccaccgtttcgccaatcgagctggaaaacgcggtgcgcgggcgtgccgataccggttttggcgtgatgagcgaagaagagctgaaacaggcggtcgccgcggcgcgtaagcgtggcgaaaaagtggtgatgaccaacggcgtcttcgacattctgcacgcgggtcacgtttcgtatctggccaatgcgcgcaagctgggcgatcgtctgatcgtcgccgtcaacagcgatgcctcaaccaaacgtttgaaaggcgaaacccgcccggtcaacccgctggaacagcggatgatcgtgctgggagcgctggaagccgtcgattgggtcgtgtcgtttgaagaagatacgccgcagcggctgattgccgggatcctgccggatctgttggtgaaaggcggtgattacaagccggagcagatcgccggcagcgaagaggtatgggccaacggcggcgaagtgctggtgctcaactttgaagatggctgctcgactaccaatattatcaagaagattcagaaagatagcgacaagtaatcaatacgctttaccgctctgaacggagcggtctacaacggcctgcggggataccttcgcgggccgtttttatttaatcatgcggaaaatgatttagcgcaataaataatccggttaagcgcatttttcgtacaaagtacgttaaggtaagcgtaaatactgaagttagtaaaaggcatatgaccaatcagaacgccaacggctgaaggagtatgcggatgaaccataacgatatgtattctatgaagaacttcgattttctggcacgtagttttgccaggatgcacgcgcaaggccattcggttgatcttcaggctattgtcggcaatatggatgaggaacatcgtgaatggttttgccaacgctatgagctttattgtcgtcaggtgagtagcccggccgagttagagcactaagccaaatgaaaacgggccatcaggcccgtcagactgctgacaaagaaggaaaaagcgtggtttttccttctttgtggttatcagccgaaaatcaataaattgattttccatattttttatctggtgcaatctgtaagtgcaaagattgcatcaagtttgtcatcaatctcaaacgggccatcaggcccgtttttttattgctgttcttcgctcttcggcacagctgaacggctttccagatcgctaatgcgctgctccagtaaagccagcttttcgcgggtgcgcagcagaacctgagtttgcacatcgaactcttcgcggctgaccaaatccaggcgagttaactgcgattgcagtacctggcggattttcttttctacgtcatctccaagatcgcgaaggcctttcggcatcgattcatggacctggcgggcgatttgttcaatttttttcgggtcaatcatggcggattcctgcactggtctagttagcgttcattgtagtgcgaacgggagcgcctataaaccacaaatgtcagatgtgtagtgagtagccattgatgaagatagttaatggcgttatagttatctcgcttattctcagggcggggcgaaattccccaccggcggtaaatcaacctgcgcgttgaaagcccgcgagcgcttcctgtgaaaacgggaaggtcagcagatccggtgtaattccggggccgacggttaaagtccggatgggagagagtaacggctcagtcgggttacgatccgcttgcgttgacttttgccgctaaaccggcactcctaagactgccctgattctggtaaccataattttaatgaggtttttttaccatgaatcagacgctcctttcttcttttggtaccgcttttgaacgtgtggaacacgctttagacgcactgcgcgaagggcgcggtgtgatggtgcttgatgatgaagaccgtgaaaacgaaggcgatatgattttcgccgccgaaaccatgaccgttgagcaaatggcgctgaccattcgtcacggcagcggcattgtctgcctgtgcctgactgaagatcgccgcaagcagcttgacctgccgatgatggtggagaacaacaccagcgcctacggcaccggctttaccgtgaccattgaagcggcagaaggcgtaaccaccggcgtatccgccgctgatcgcatcacgaccgtgcgcgccgccattgccgatggcgcgaaaccatccgatctcaaccgtccgggccacgtcttcccgctgcgtgcgcagccaggcggcgtaatgacccgcggcggccacactgaagcgaccatcgacctggtgacccttgcgggctttaaaccggcaggcgttctctgtgaactgactaacgacgatggtaccatggcgcgcgcgccggagtgcatcaagttcgctcagcagcacaacatggccgttgtcaccattgaagacctggtggcttaccgccgcgagcacgatcgcaaagccagctaagttgccgctgttctgatgacaagcccactttacggtgggctttgttgtttctggggcgagctagtatgctttctctgcgggtacatgggagagatttttcaccttcaaattttctgatgatgatcatcacgcttatctgagtttatctgcggctaaaagcgcgtaatgtgaaggaatcaaatactccctactgaaggataccatcatgtcccgtacccgtatgccagcgttgtttttaggccatggtagcccgatgaacgtgctggaagataatatctatacccgcgcctggcgtcatctcggcgaaacgctgccgcgaccgaaagctatcgtggttatctccgcgcactggtttactcgcgggacgggcgtgacggcaatggaagcgccgaaaactattcatgattttggcggttttccgcaagctttgtacgatacgcactatcctgcgccgggctcgccggagctggcgcagcatctggttgagctgctggcgccggtacccgtcgccctcgataaagaggcgtggggttttgaccacggttcgtggggggtgctgatcaaaatgtaccctgatgccgatatcccaatggttcagttaagtatcgatagcaccaagcccgcggcgtggcatctggagatggggcgtaagctggcgtcgctgcgtgatgaaggcattatgctggtggcgagcggcaacgtggtacataacctgcgtaccgcgcgctggcatggcgagagcacgccgtatccgtgggcccagtcgtttaatgactatgtcaaagcgaatctgaactggaaagggccggtcgaagcgcatccgctggtgaattatttaagccatgaaggtggttcgctctctaacccaacggctgaacatttcctgccgctgctctatattctgggagcgtgggatggtgaagagccgataacgatccctgtcgaagggatggagatggggtcgctgagtatgctgtcggtggtcgtgggtgccgcgtaacggcagctatcgcacatgaaaaaaccccggccactcaggttgccggggtttgccgttattcgacgaaaatgtgcggatagaaacgcgaaagatcctgggtgatcagcgcccgatcttcacggatgccgatcccggcaggctggtcattaataagccagctgccaatcagcgtatagctatcgccaaatttcggcagcgggtaaaactcctgcacgatggtgccttcttccccgtacggaccttccaccgcctccaccactttgccattttcaacgatcgacacgttggcgccttcgcgggagaaaatcggtttaatgacgtacttctcaagctgcggatggttatcttcgctgaagtaagccgccaacaggttagggtggttggggaacatttcccacagcatcggcagcagcgccttgttggagataatgctcttccatgcaggctccagccagcgtacgccggcgtcttccagcttggtggagaacatctcgcgcagcataaattcccacggatagagcttgaacagattaccgatgacctgatcctgtaaatcggtaaactgacctttttcgccaagaccgatatcttcgatatacaggaactcggtggcgacgcccgcttctgccgcgcagtcctgcagatactgtacggtgccgcggtcttcaacggtatcgcggcagcaggccatatgcagcagctggaagccaaactgttcacgcagctcgccgaagcgttcaatgagcttttcctgcagactattgaactgatcgctgttggcaggcagattaccggcgttaagctgatcttccagccagatccattgaaagaacgctgcttcatatagcgaggttggcgtatccgcgttgttctccagcagcttcggttcgcccacgccatcccaggccagatccagacgcgagtacagcgacggctgattggttttccacgactgacgcacaaagccccaggtgtgcttagggatgcggaatttggtcatcagctcgtcgctggcgatcactttctcaacgacctgtagacacatttgatgcagctcggcggtgaccgcttcgagcttttcaacctgcgccagcgtcagcttgtagtaggcctcttcgctccagtacggctcgccgtacatggtgtgaaagttgaagccatactcggtcgctttctcgcgccagtccgggcgctcggtaatgctgattctttccatgccgcttaaccgcccatcgagcgtgaagaggtgctggagcccgtggcgctacgctgcatcgtcgattgcttagcaacggattcgccaaaaccgccgcgggtgacggtcgtcgtggttgccggtttcggcgccatcgcggtttttggcacgttcatggtacggcccggttgcgctgcgccatagctcttaccgctggcatcggtgtactggccgtaggccgggctggccgggttcttcgagctaaacagcggctgctgcgcggccatgccgccgcccatcaggcgacccatcatgtagccggccatcagcggcatccagaagctgccgctgctttgcgcctgtgcctggttttccggggcgacgccagcctgagccggcgcctgctggcattggccttcgccaaactcggcgacgcagtcttcacggctggcgtatttcggcgcggtgcgcacggcttctttcaccgcgttattgtaggcggtggtgcactctgcggctttgcttgggttagccgcggagcagtcatcggcgttctgatacagagacaccgtctcgtcagttttttcgcaaccggcgagcataaagacggcggtgacggcaagggcgaccggcgtcaggtggcgagcgctccagcttttgcggaacgacgcatgattaatattttttgtccgtttcatatttgtcttccaggacccagtggtagtgcgtttgtcaacgctcaggatagagtatgagtggtggaaaatgaagcgaaagaggggaaaagcgggggtctttacgttgtcttacgttttacgccccgcctgacccgcaggccagacgaggcgtaatcgcattcaacgattagtgactaaacggattggaaccgctggtcttcgtcgtacgggcggcagccggctgtgcggatgcggtgttcgcataaccgtcagcggcggcgtcctgctgcgggttttccggcgcgacgctgtctggtgaagttggaatcgctttacccagcgtgttgttcagcgcgatcagatcctgctcgttcagcgtgccgagagcggacttaatgtttagctcgttgatcaggtagttataacgggcgttggagagctgctgcttggcgttgtacagcgtggtggtcgcatccaacacgtcaacgatggtacgagtacccaccgaataacccgcttccatcgcatccagggagctctgcgcagagaccaccgcctgtttgtaggcgttgatgctgctgatggaggcattcacgttgttaaacgacgaacgcacggtctgcacgacgctgcggtgcgcgctttccaactgctcgctggcaccgacaaagttgtactgcgcttgtttcacctgcgagttaaccatcccgccctgatacagcggcagggagaagctcaggccgactttgttttgcccgatatcggcgtcctgggaaatgtttttggaaccgctgtaacggttgttagagacgccggtagaagcattcaaatcaagagtaggtaaatggccatcctgcgcctggcgaatctgctcacgagccagatcctgattcagacgcgcctgcagcagcgacaggttgcggttttccgcttccttcagcagcgcgttcaccgcctgcggtttgttggttttgaagccgttaacgttcagcgacgccagttccggatagtagttgccggtgacctgacgcagctcttcaacggcgttgtcgaggtcgttacgcgcggtcacttcattcgccagcacggcgtcatattgcgagcgggcgttttgcacgtcggtgatggcaaccaggcccacgttaaagcgctgggtggtttgatccaactggcggtagatggcctgtttctgcgcttcggtataggagagcgtatcgatagcggccagaactttaaagtaagccgtagcggtattcagaatcagcgtttgctggtcagtctgataggtgacatcctgaatgcccgccgctttttcctgcagggtcagcgcgcgccatttcgacatatcgaacagggtttgcgttaactgcagtgaaccgctggtgacgttggagttctggtttttgtaatcacggaacccgctggtataggtataatctgcgcccagaccgagttgcggcagtaatgggcttcgcgcttcgttgatcttttcgaatgcagcatcgcgatcggctgccgatttacgcaggtcagggttgctaatacgcgcctgctgataaacctgcaacaggttctctgcctggctcatggcgctgaagccagtcaggcccaggccgataaggatgggaaaaagtttcttcatttgcattccttgttgtgaagcatttagcgctactcaaattctaaaaataatcgctgattgtatcgactctgtcgccgtaaaaagttggcgttacgtgccatagggcggtaatttgcaccaatctaacatacaggccgtaaaacggtagccaaacggcctataaatccctactttcggatgagcaggacacagacaatgagcaaacctaatcagcagggaattaccttctctaaaaacgatgtagaaattattgcacgggaaacgctctatcgcggttttttttcgctcgatttgtatcgttttcgccatcgcctgtttaacggtgggatgagcggtgaggttacccgcgaaatttttgagcgcgggcacgccgccgtcttgctaccctttgacccggtacgcgatgaagttgtgctggtcgagcagatccgcattgccgcctatgataccagcgagagcccgtggctgctggaaatggtcgccggaatgatagaagaaggcgaaacggtagaggatgtcgcccgccgtgaagcactggaagaggccgggcttgaagttggacgtaccaaaccaatattaagctatctggcaagtccaggcggcaccagcgaacggttatcgatcctggtgggcgaagttgatgcatcgacggcaaaaggcattcacggcctggccgaagaaaatgaggatattcgggtgcatgtggtgagccgggaacaggcttaccagtgggtagaagaggggaaaatcgacaacgcggcttctgtcatcgccctgcaatggctgcagctgcattatcatagcttacgaaacgagtggaaataatatgaagcgttatacacctgacttcccggaaatgatgcgcctgtgcgaaaccaatttcgcccagctgcgccgcctgttgcctcgcactgaggcggttggcgatatggcgaactatcaggtgggtgcggcgcaataccgattaacggtggtcgaatcgacccgctacactacattggtgacaatagaacagactatgcctgcggtgagctactggagcctgccgtcaatgacggtgcgcctgtaccacgacgccatggtggctgaagtgtgttcaagtcagcagatttttcgcttcaaagcgagatatgattatcctaataaaaagttgcatcaacgcgacgaaaagcatcaaattaatcagtttctggccgactggctgcgttactgtttagcacatggagcgatggcgattccggtttgttagcgtcgtgaaacctaaggacaccatttggaaagcctgttaaacctacctctggctggtgaggccagagtcaggatattacaaattactgatactcacctgtttgctgaaaaacatgaaacgctgttgggtatcaatacctgggaaagttatcaggctgtattggatgcgatacatgcctcacagcgtgaatgcgacctgattgtagcaacaggcgatctggcgcaagaccactctgccgcggcctatcagcatttcgctgaaggcatcgcgagctttgccgcaccctgcgtctggctgccgggaaaccatgatttccaaccggcgatgtacagcacgctgcatgatgccggcatttcccccgcaaaacgcgtcctgttgggcgaccattggcaaatcctgttgctggacagccaggtcttcggcgtgccccacggtgagctgagtgatttccaactggagtggcttgagcatcaattgaatgcggaacctgagcgctacacgctgctgttactgcatcatcatccgctgccggcgggctgtagctggctcgatcagcatagcctgcgcaacgctggcgcgttagatcacatcctgagcaactatccgcgggttaagcatctgctgtgcggccatattcaccaggaactggatctcgactggaacgggcgacggatgatggcgacgccatcgacctgcgtgcagtttaagccacactgcgctaatttcaccctcgataccatctctccaggctggcgctggcttgaactgcatcctgatggcgcgttgacgactgaagtctgtcgtctcagcggcgccgagtttcatccggatatcgcttcagaaggatactgatgtctactcttctttatctgcacggatttaatagctcgccgcgctcggcaaaagcgacggcgctgaaaacgtggctggcgcagcaccacccggaaattaacatggtggtgccggaactgcctgctttcccggcgcaggcggcagagatgctggaagctatcgtgctggagcacggcggcgagccgttaggcgtggtggggtcgtcattgggcggctactacgccacctggctgtcgcaatgttttatgctgccggcggtggtgattaacccggcggtgcggccatttgaactgttgaacaattttcttggccccaatgagaatccgtacaccgggcagcaatatgtgctagagtctcgccatatttacgatcttaaagtcatgcatatcgacccgctggaagcgcctgaccttatctggttattgcagcaaacgggcgatgaagtgcttgattaccgccaggctgttgactacttcgcctcctgccgtcaaacggtcgaggagggcggtaatcacgcatttgttggctttgaagatcatttcacccagattatcgattttctgggcctgcgctaagcggttcagaacgacctacgaatacacaccatgacgcaatcttcatataacgctgatgccattgaggtactcaccgggcttgagccggttcgccgccgcccgggaatgtacaccgacacaacccgtcctaaccatcttggtcaggaagttattgataacagtgtggatgaagcactggccggtcacgccaaacgcgttgaggtcatccttcatgccgatcaatcgttggaagtcattgacgacgggcgcgggatgccggttgatatccacccggaagaaggggttccggcggttgagctgatcctttgtcggctgcacgcgggcgggaagttttctaacaaaaactaccagttctccggtggcctgcatggggtggggatttctgtcgtcaacgccttgtctaagcgcgtggaagtcaacgtgcgccgcgatggtcaggtctacagcatcgcctttgagaacggggaaaaagttgaagacctgcgcgtcaccggcacctgcggtaaacgcaacaccgggaccagcgtccatttctggcctgacgaaagcttcttcgatagcccgcgtttctccgtctcgcgcctaactcacctgttaaaagcgaaagcggtgctgtgcccggggtggaaattgtgttccgcgaccaggtgaacaacagcgagcagcgctggtgctatgcggacggcctaaatgattatctgtgcgaggcggtcaacggcctgccgctgctgccggaaaaaccgtttgtcggcaacttctccggcgaaacggaagcggtggattgggcgctgctgtggctgccggaaggcggcgaactgctgaccgaaagctacgtcaacttgatcccgactatgcagggcggtacccacgttaacggtctgcgtcaggggttgctcgacgcgatgcgcgagttttgcgaataccgcaatattctgccgcgcggcgttaagctgtcggcggaagatatctgggatcgctgcgcgtacgtactgtcggtgaagatgcaggatccgcagttcgccgggcagacgaaagaacgtctgtcgtcgcgccagtgcgcggcattcgtctccggggtggttaaagacgccttcagcctgtggctgaaccagaacgttcaggcggcggagctgctggcggaaatggccatttccagcgcccagcgtcgcctgcgcgccgccaagaaagtggtgcgcaaaaagctcaccagcggcccggcgctgccgggtaagctggcggactgcaccgcgcaggacctgaaccgcaccgaactgttcctcgtcgaaggggactcggcgggcggttcggcgaaacaggcgcgcgaccgtgaatatcaggcgattatgccgctgaaaggcaagatcctgaacacctgggaagtatcttccgatgaagtgctcgcttcgcaagaagtgcacgacatttcggtggcgattggtatcgacccggatagcgatgacttaagccagctgcgttacggtaaaatctgtattctcgccgatgccgactcggatggtctgcacattgctaccctgctgtgcgcgctgtttgttaagcatttccgtactctggtgaaagagggccacgtgtacgtcgcgctgccgccgctgtatcgtatcgacctgggtaaagaggtttactacgcgctgacggaagaagaaaaagccggcgtgctggagcagttgaagcgtaagaaaggcaagccgaacgtacagcgctttaaagggctgggtgagatgaacccgatgcagctacgtgaaaccacgctcgacccgaacacccgccgcctggtgcagctcatcatcaccgatgaagacgagcagcaaacgaccgcggtgatggatatgctgttggccaagaagcgttctgaagaccgtcgcaactggctgcaggaaaaaggcgatatggcggatctcgaagcctaagccgacgtcacgtcagatgcgaaaaagggagcctcaggctcccttttttacttctgtcaggcttatacgccagcctgcaggatgcggatgctggtttccagcacgtcgccttttaccgcttcggcgtaagccttcatgtgcggcgtttgcagatgcgcttcgagatgcgcgacgctttcccactgctcgaccataacgatcgaatccggggcggaagtttgaaaactcacgcctgcggcgtggtcaaccagcggcgcgtagccgtggcagccttcttcctgcagtaccacagggacaattttagcgaactgatccagtaccgcctgacggtggtgctggcccggacgagtacgaatttcggcaatcactgttaacatggttaactcaactccttctgtatgtaggcttctagttaaccaaaaatcgccgccagatgcttgcgatattctgcgatgacgtgtggaacgtcaggcattttaatcacgtcgttggcgataaaggtcggcatcgcgctcatgccaaggaactggttagctttgtggaacggcaggtaaacgccatcaacgccgacgccgtggaagaactgatctttatcggtgaaagcttccatcggcgcgttccaggttagcgacagcatatactgtttgccctgaatcaacccgccggagccatattttttgctgtcatcggagcgggtacggccatcgctggcgtacagagaaccatggccttcggtgaatacgtcatccatgtactttttcacggtccacggcgcgcccatccaccagcccggcatctgccagataaccacatcggcccacaggaaattctgcacttcttcttttacatcgtactcgctttccgcgcggacgattttaacatcatgcccgacgtcgcgcagataaccatccgcgacctcggtcagggtgtcgtttaattggccattagagtgagcgaattttttcgccccgttgataatcaatatgttgctcattttttgccctcaatctattaaatttgtcggcaattttaccccgcgaagcggggcagtaaaatgagcaaaatgtgcaaagtcttttgcatttttggcaataatgttgctaccagtaaacgcgcgcctcgaagccgccgtcgcgcgcgttagcaaattcaacccgcatgccgtgcagcgaggcgatgcgacgaacgattgataagcctaatccgctgccgggggcatcctggcccggcgggcgataaaaacgctcgccaatgcgcgccagggcttgcggactaatgcctggaccattgtcgcggacccggaattcgcgggcggaaagggtgatatccacctggctaccgcgcgggctgtagcgtatggcattatccagcagattgcgtaccagcaggctgagcagcagcggctggccggtgcggacgatattgctggcgttcagatgcaggcgtaactcaatggcggactgctgcgcgtggtgatacatctccattacagccgactgcaacaggtcgtcgatggcgaccggctgcacgtcatccagttgggcaagggaatccagccgcgacagcgtaagtaattgatcgaccagccgagtggcgcggtcgatgccctgatgtaattgcgccaacgctttatcccgaccttcgggatcgtccatcgaaagctgggcgacttcggtttgcaccttcagcgccgccagcggactgcgcaactcatgggcggcatcagaggtaaagcgacgctcgcgtagcatggtttcgtgggtacggctgaatagctgattcagggcatcgaccagcgggcgaacttccgaagggattttgtcgtccggcagacgttccgccgagtccggcgcgcgctggcgcagggttctagccagtttcttcaatggcgccagctcgcggcttaatagcacgatgagcagcacgaacatcagcggtagcgcgaccagccatggcgtgagctgcgaggtaacgatatccatcgccatttcccggcgataatcccactcctggccgacggcgatacgatggcggccgtcagcggtggtcagccacagaaaacgccattcgtcgtcatcgccgcgcaggtagccgtcgctgaagccttcgcgctgcgaaccccattgaatatcttcgccgttttcaccatcgttaagcaccatttttccgtcgcgggtgaaaatagcgaaggccagcgcgtcatcatcaagatggccgtgtttaacttttttcttttcgcggatctgcgccggtcgcgcctgcagctcatcgacattcatcgcgctcaggcggcgggcgaagagcagttgttgggtatcaaacagcttatccagcttttcgctggtctgctgccaggcgataacgctggcgatcccccaggcggcgctggttagcaggacaaacagcagcgtcaggcgcaggcgtaggctcagatgggcgagtcgtttcatgcgtcacccagggtatagccgatgccgtgcacggtacggataaaaccactgccaagtttgcgccgtagatggtggacgtgaacttccacagcgttgctggagacctcgtcgtcccagttatagagcttttcctcgataagcttacgcggcaacacgcgcccggcgttgcgcataagcagttccagcagggcgaactccttcggctttagcgccaggctttcgccgtcgaggctggcggttaagcggttcgggtcgagggtcaccttaccgtggcgtagctcgctgctgctctggccgtgagcgcggcggatcagcgcctcgagacgcgccgctacctcaatcagggcgaagggtttacacagatagtcatcggcgccgagctgtagcccttcaacccgctggctaagcgcgtcgcgggcggtgaggatcagcacgggttcattacggcctttatcgcgccattcgcgcagaatatcgagaccgtcaatgccggggagagtcaggtcaagtatcgcggcgtcgtaaggggcgctatataaggcgtttttgccctcctggcctgcggtgaaccagtcgatgctgaagcccattttgctcagcccggctttgatgccgtcgccgatcagtttgtcatcttccaccaataatatgcgcatgtttccctccgacgatcccgtttctttgcgcagtaaaccgcgttgaagcaggggatgtacagcattaaaatttctttttgccgcttaagaagtcgttaagttttgtcaggcgtaataggagccataccaacacataagggagaatataagatgaaaaaaattgctgcgatgaccgcgattattgctttggtttccatgccggtactggccgccgggcagggtggattcaccggaccgtctactaccactacctcgcaggccggcggcttcaccgggccgagcggcgcggtgaccaccgtggcgaatgccaagtcgctgcgtgatgacacttgggtgaccctgcgcggtaaaatcgtcgagcgcatctctgatgatctgtataaattccaggatgcctccggcgtggtgaacgtcgatatcgaccataagcgctggaacggcgtgaccgtcggcccgcaggatacggtagaaattcagggggaagtcgataaagactggaactcggtagagatcgacgtgaagcagatccgtaaaatcacgccataaggtcagcccggcctacgactggttatccgcctgcggggagacgctaagggattttccggtgtatttccgctacctcaattttgtgcatgaagttggcgagcatgaactacaaaccgatatttatttgccgctagcctgattgatatcctcatcctctttaaccgatctcacatcctgtgactcagggcgtgagatcgggtattatcgcgggtagttttgccgccgcaatggccgcgtcccagattgaggatccacgattaatgagcgatatggcagagcgcctcgcgctacatgaattcacggaaaatgcctacctgaactactccatgtacgtcatcatggacagggcattgccgtttattggcgatggcttaaagccggttcagcgccgcattgtctatgcaatgtccgagctgggcctgaacgccagcgccaagttcaagaaatccgcccgcaccgtcggcgacgtgttgggtaaatatcacccgcacggcgacagcgcctgctatgaagcgatggtgctgatggcgcagccgttctcttaccgctacccgctggtagacgggcaggggaactggggcgcgccggacgatccgaaatctttcgcggcgatgcgttataccgagtcccgtctgtcgaaatacgccgaactgctgctcagcgagctcggccagggcaccgtcgattgggtgccgaactttgacggtacgctgcaggagccgaaaatgctgcctgcgcgtctgccgaacattctgctgaacggcaccaccggcattgcggtcggtatggctaccgatattccgccgcacaacctgcgtgaagtggcgcaggcggcgattacgctgctggaaaaaccgaaaaccacgctcgatgagctgctggatatcgtgcaggggccggactacccgactgaagcggaaatcattaccccgcgcgcggaaattcgcaaaatctaccagaacggccgcggttcggtgcgcatgcgcgccgtgtggacgaaagaggacggcgcggtggtgattagcgcgctgccgcatcaggtgtccggcgcgcgcgtgctggagcagatcgccgcgcagatgcgtaacaaaaagctgccgatggttgatgatctacgtgatgaatcggatcatgaaaacccgacccgtctggtgatcgtgccgcgttccaaccgcgtggatatggagcaggtgatgaaccacctgttcgccaccaccgatctggaaaagagctaccgcatcaacctcaacatgatcggcctggacaatcgtccggcggtgaaaaacctgcttgaaattctgacggagtggttgaccttccgtcgtgataccgtgcgtaaccgcctgaactaccgtctggaaaaagtccttaaacgcctgcacatcctcgaaggtttgctggtcgcgttcctcaacattgatgaagtgattgaaataatccgccacgaagatgaaccaaagccggcgctgattgcccgtttcggcatcagcgaaacccaggcggaagcgattctggaattaaaactgcgccatctcgccagactggaagagatgaagatccgcggcgagcagagtgagctggaaaaagagcgcgatcagctgcaggcgattctggcctccgagcgcaagatgaataacctgctgaagaaagagctgcaggccgatgccgatacctttggcgacgatcgccgttcgccgctacgcgagcgcgaagaagcgaaggcgatgagcgagcacgatatgctgccgtccgagccggtcactatcgttctgtcgcagatgggttgggtgcgtagcgccaaaggccacgatatcgacgcgcaggggctgagctacaaagccggcgatagctggaaagcgtcggtgaaaggcaagagcaaccagccggtggtgttcattgatactaccgggcgcagctacgccatcgacccgattacgctgccttccgcccgcggccagggcgagccggtcactggtaaagtgacgttgccgccgggcgccagcgtagaacatatgctgatggaggcagacgatcggaagctgctgatggcttccgatgccggctacggtttcgtctgtaccttcaatgacctggtggcgcgcaaccgcgccggtaaggcgctgattacgctgccggagaacgcgcatgtcatgccgcctctggtcattgaagacgatgccgatatgctgttggcgattacccatgccgggcgcatgctgatgttcccggtgagcgacctgccgcagctgtcgaaaggcaaaggcaacaagattatcaacattccgtcggcggaagctgcctccggccaggatggtctggcgcacctgtttgttctgccgccgcagagcacgctaactatccacgtcggcaagcgtaagatcaaactgcgtccggaagagctgcaaaaagtcaccggcgagcgcggccgtcgcggttcgctgatgcgcggcctgcagaaaatcgaccgcgtggagatcgactccccgcgccgcgcctcagctggcgacagcgaagagtaagatccgcatccttcacccggctggaggatgcgaaaatttgccgcaaaatcgttgtttattcaggcattgcgattaacatgtccccagggcggagattttccgccccgcgttgagagggcagcggtgtcctgagcctgtgattccacgggtataacgctaagcggtttgggtttcagaggaagctatgttatttatttttcgactaatttttgttgtcatttattgcatcgtcgtgtgcatatttggcagtctttactgcttgttcagcccgcgcaaccctaagcacgtcgcgacgtttggtcatctgtttggccgtctgtccccggtattcggcctgaaagtcgagctgcgtaagcccgcggacgcggaaagctacggcaatgcgatctacatcgctaaccaccagaataactatgatatggtgacagcgtcgaacatcgtgcagccgccgacggttaccgtgggtaaaaaaagcctgttatggataccgttctttggccagctttactggctgacgggcaacctgctgattgaccgtaataaccgaaccaaagcgcatggcaccattgccgaagtggtgaatgcgtttaaaaagcgtaaaatttcgttctggatgttcccggaagggacccgcagccgcggccgcggtctgctgccctttaaaaccggcgctttccacgcggccatcgccgctggtgtgccgattattccagtatgcgtgtcgaatacatcgaacaaaattaaactcaatcgctggaacaacggtctggtgattgtcgagatgctgccgccggtcgataccagccagttcggtaaagataacgtgcgtgcgctggcgacacactgccgtgagctgatgtccgctaaaatcgccgagctggataaagaagtggccgagcgcgaagcagctggaaagaaataatacaggaaacgccgcgaacgcgagcgtattgctggcgggaaacgaattccctttttgcattgtcagtatttcatggagttaatatgtcactcagtcggcgtcagtttattaaggcttcaggtgtagcgctgtgcgcgggcgccgcgccgctgaaggctcatgccgccggccagcagccggcgctccccataccgcctttgctggaatcccgtcgcggtcagccgctgtttatgaccctgcaacgttcccactggtcattcacccagggaacgcgcgcgccggtatggggcatcaatggccgctacctcgggccgaccatccgcgtctggaatggcgatgacgtcaaacttatctacagtaaccgcctgaccgaaaacgtcgccatgacgattcgcggcctgcaggtgccgggcccgctgattggcggcgcggcgcgcatgatgtcgccgaatgcggattgggcgccggtgctgccgatccgtcagagcgcggccaccctgtggtatcaggcgaataccccgaaccggatggcgaaacaggtttacaacggcctggcgggaatgtggctggtagaagacgaagtcagcaaaaacctgccgatcccgaaccactacggcgttgatgacttcccggtgattattcaggataagcggctggataacttcggtaccccggaatatagcgaaccgggcagcggtggtttcgtgggcgataccctgttggtcaacggcgcgcaggggccctatgtcgaagtctcacgcggctgggtacgcctgcgtctgctgaacgcttctaactcgcgccgctatcagctgcagatgagcgatggccgcctgctgcacgttatctcaggcgatcagggcttcctgccggcgccggtctcacttaagcaattgtcgctggcccccggcgagcggcgtgaaattctggtcgatatgaccaacggcgatgaagtgtcgattacctgcggcgaagcggcgagcatcgtcgatcgtatccgcggtttcttcgagccgtcgagcattttgatctccacgctggtgctgacgctgcgtccgaccgggctgctgccgctggttaccgatagcctgccggtgcgcctgctgccgaccgagctgctctccggcacgccgctgcgcagccgtgatattacgctcggcgacgacccaggcatcaacggccaactgtgggatccgcagcgcattgatatcaccgcccagcaggggacgtgggagcgctggaccgtgcgtgccgaccgcccgcagtcgttccatattgaaggcgtgatgttccagattcgtaacgtcaacgggaccatgccgttcccggaagatcggggctggaaagatacggtgtggattgatgggcaggtggaactgctggtgtattataaccagccttcctggccgcacttcccgttccagtacctgagccagacgctggagctcgccgaccgcggctcgattggccagattctggtgaatccggcgccgtaatatccgtaaccctggccgcaacacggtcagggtttgagaaaatcctccttcatttccactatcattccggcttataatccacgcccttttggttatttttttatcattttccccggaagcaatatgagcgcaatatccctgatccagccggatcgtgacctattttcctggccgcaatactgggctgcctgttttggccctgcgccatttttaccaatgtcgcgtgaagagatggatcaacttggctgggatagctgcgacattattttggtgaccggtgacgcctacgtcgaccatccaagtttcggcatggctatctgcggccgtatgctggaagcgcagggattccgcgtagggatcatctcccagccggactggaacagcaaagaagacttcatgcgcctgggtaagccgaatctgttcttcggcgtcaccgcgggcaatatggactcaatgatcaaccgctataccgccgaccgtaagctgcgccatgacgacgcttataccgccggcaatgtcgcgggtaagcgcccggaccgcgcgacgctggtctatacccagcgctgtaaagaagcatggaaagacgtgccggtgatcctcggcggtattgaagccagcctgcgccgtaccgcgcactacgattattggtccgataccgtgcgccgctcggtgctggtggattcgaaagccgatatgctgatgttcggtaacggcgagcgcccgctggtagaagtggcgcatcgtctggcaatgggcgaggccatcggtgatattcgcgatgtgcgtaataccgcgatcatggtaaaagaagcgttgccgggctggagcggcgttgactccacgcgtctggatacgccgggcaaaatcgacccgattccgcatccgtacggtgaagacctgccgtgtgcagacaacaaaccggtagccccgaaaaaagccgaggctaaagccgttgtcgtgcagccgccgcggccaaaaccgtgggaaaaaacctacgtattgctgccttcctttgagaaggtcaaaggcgacaaagtgctgtacgctcacgcgtcgcgcattctgcaccatgaaaccaaccccggctgcgcccgcgcgctgatgcaaaagcacggcgagcgttatatctgggttaacccgccggcgatcccgctgtcgactgaagagatggacagcgtctttgcgttaccgtacaagcgtgtgccgcatccttcttatggcgatgcgcgtatcccggcctacgagatgattcgcttctccattaacattatgcgcggctgtttcggcggctgttctttctgctcgatcaccgaacacgaagggcgcattatccagagccgctccgaagattcgatcattaatgaaatcgaagcgattcgcgacacggtccccggctttaccggcattatttccgatcttggcggcccaaccgccaatatgtatatgctgcgctgcaaatccccgcgcgctgagcagacctgccgccgtctctcctgcgtctacccggatatctgcccgcacatggataccaaccatgagccgacgattaatctgtaccgtcgcgcccgcgacctgaaaggtatcaagaaaatccttatcgcatcgggtgtgcgttacgatatcgccgtagaggatccacgctatatcaaagagctggcgacccaccacgtcggcggctacctgaagatcgctccggagcataccgaagaggggccgctgtcgaagatgatgaagccgggcatgggcagctatgaccgctttaaagaattgtttgatacctattcgaagcaggcgggtaaagaacagtacctgatcccgtactttatttccgcccacccgggacgcgcgatgaagatatggtgaacctggcgctgtggctgaagcgtcatcgcttccgtctcgaccaggtacagaatttctacccgtcgccgctggcgaactcaaccaccatgtattacaccggcaagaacccgctgggtaaaattggctataagagcgaagatgtggtggtgccgaagggcgacaaacagcgccgtctgcataaagcgctgctgcgctatcacgatccggcaaactggccgctgatccgtcaggcgctggaagcgatgggtaaaaagcatctgattggttcacgccgtgattgcctggtgccggcgccgacgctggacgagatgcgtgaagcgcgtcgccagaaccgtcatacccgtccggcgctgactaagcatacgccggttgcgcatcagcgccagacgccaaccgcctcggggcgaaaaagcgtatcaagccgaagacagcgtcccgctaagccgcttccccggcgggtgcgctcgccgtgggaaagcctgtcacacaaggagagataacgataatgacgccggtaatcctgtcacgacagcagctggataggttgtgggagatagaccgcagcgaaattatcgacaccctttataagctcgataatggccggcttcaggcgtacccgcagtattatgacgtgcgcggttgggatcctcacgatcgccaggtttatacgcctattcacgaggcctgctacgatcgcggcggtatatttttcgcctttttcgagcagaataaaatcattgccgcggcggcgatggataccttgccaaggggtgaaaagggcgatctgcgccaactgttattcttttatgtgggcgcagcgcagcgcggccggggatgggggcgacgtctgtttgactatgcgctgcagcagcttcctgctctgggcgcatccggcctgtatatttcgtccatccccaacaaaagcaccgttgatttttatctctcccaggggtgtcgtttaattgatgagcccgatccggagctgtttgctctggagcctgaggatattcatttaatttgcgaaagcctttagcgccgcgcggcgctaaaggcaaaagtgatggagattaaccgccgaactgatccgggtcggggccgagacgtttgccctggtccagcttagcgatttcactgagttcgtctttgtcgagacggaagtcccagacgtcaaagttctccgcgatacgcgatggcgtgacggatttcgggatcaccaccagtccgctgtcgagatgccagcgaatgacgatttgcgccggcgttttgccgtatttatccgccagatggtgaataattttctgatcgaagacccctttgccgccctgcgctaatgggctccaggattcggtctggattttgtgggtggcgttccatgcatgcagttgacgctgctgcattaacgggtgcagctcaatctggttgatcaccggagcgacgcctgtttcatcaatcaacttttgcagatgcggcacctggaaattacacaccccgatgctttttgccagcccttgctgctgcaattcgatcagcgcctgccaggcttcgacgtaatggcctatcgctggcaccggccagtgaattaaatagagatccacatagtccagtttcagcttgctcaggctctcttttagcgcttcatgcggccgtttttgatcgtcattccacagtttggtcgtgatgaagagctcatcgcgattgacgcccgcgctgcttaacgcgttgccgacgccagcctcattttggtacgcggcggcggtgtcaaaagaacgataaccgacttccagcgccttatgaatggcggagacgacttcctcgttgcctgctttccacacgccgagacccaactgcggcatcaggttgccgtcgtgtagttttataacggttggatgtgtcatgccttcctcctgttaatgaactcagcgtgaaaaatccgctgaggggtagcattaagtctggacgaaatagctaaaaacggtagtaaaaacacctctccccggcgtttgtttaacgtaaggagaggtgaatcaggcggggagaacttagcgggcagcctcgtaaatacggcggctgacgtccagagtgatatcctgattttcgccaagcttagtcatgccgtgctcttccagtttcgccagaagcgccgggatggagctaccgtcaagaccgtaatctgaaaggcgagtcggcacgcccatctgctcgaagaaactccgggttgcggcgatagcggcatcgatacgctgttcttcggagccctcggtgatattccacacgcgttcggcgtactgcagcagcttagcgcgcttggtatcgcgtttctcattccacagcgccggcagcacgatagccagcgtctgagcgtgatccaggccgtgcatcgccgtcagttcgtgaccgagcatatgcgtcgcccagtcctgagggacgcctgcgccaatgaggccgttcaatgcctgcgtcgccgcccacataatgttggcgcgcacgttgtagttctccggctcctgcagcgctttcggaccatcttccaccagcgtcaacagaatgccttcggcgaagcggtcctgaattttgccgtcaaccgggtaggtcacgtactgctcaacggtatggacgaaagcgtcaacgacgccgttagcgacctggcgcggcggcagggtgtaggtgtaaaccggatcgaggatcgcgaagaccggctgaacgtgttcggacataaacgcgcgtttatcgccggtggttttacgtgagataaccgcacctttgtttgattcggaaccggtcgccggcagggtcaatatcgagcccatcggaatggcgctggcaatcttgttgccgtaggtttccagaatttcccacggatcgatgttggcgtcatagtgcgcggccgcggcgataaacttggtgccatcaagcaccgaaccgccgccaacagccagcaggaaagtcactttctcttcgcgagcgattttcaccgcgttcatcagcgtttcgtaagacgggtttggctcaatcccgccgaattccagcacgtcaaagccagccagcgcgctcagtacctgatccagtacgccggttttcttcacgctaccgccgccgtaagtcaccagcacgcgagcgccggctgggatttgttcgcgcaggtcggagatggcgcctttgccgaacagaatgcgggttggggtatgtaaattgaagttattcatggctagtgccctcataaagatgaaactcccggcagaaaggacgactctctgcccgatggcggctattgtgttcctgcgaccgtttcctctcaatgcacattcctgccattgtcttgcccatttctccattgggctggagaaaaggaaggaaactacgcacaataagcttgtagaaaaatcgtcggagaagcagcgaaaatgaaccgtgccgagatatgccagctattaacagataaggttaacaagctgaaagataagcaagaaatgctaagtgaactgctgccggatatccgtctgctgtacgggacgcagccgggcacccgtacgccggtgatgtaccagccggggatcgtttttctcttttccggccataaaattggctatatcaatgaacgaaccttccgttatgacaccaacgaatacttattgttaaccgtcccgctgccgttcgaatgcgaaaccttcgcgaccccggaagtgccgctggcgggaatgcggttgaatgtcgatattttgcagttgcaggagctgctgatggatatcggcgaagatgagcttttccagccttcggtcgcctccagcgggatcaactcggcggtgctatcagaagagatcctctgtgcggcggaacgcctgttagacgtgatggagcggccgctggacgcgcgcattctcggcaaacagattatccgcgagatcctttatcatgtcctgattggcccctgcggcggcgcgctgctggcgctggtcagccgacagacgcactttagtctgattagccgcgttttgaagcgtattgaaagccagtacaccgaaaacctcagcgtcgaccaactggcggcggaagcgaatatgagcgtctcggcttttcaccataactttaaatcggtcaccagtacttcgccgctacagtatttgaagacctaccgcttgcataaggccagaatgctgatgatccatgacggcatgaaagccagcgcggcggcgatgcgcgtcggctatgaaagcgcatcgcagtttagccgtgagtttaaacgctattttggtattacaccgggtgaagatgccgcgcgtattcgcacgatgcaggggatttgataaggatgcggcgcctgtagccccggtaagcggtagcgctaccggggattttgaggccatccggggcgagtgaatcaggcgctgcagtatttcttcttgataaccacaataaccgtaccaacgaggccggttaccagcagggcgatcggcagcaccatcaggcaggtcatgacctggtcttcgtggttttttacgaacgggatcatgctcagcgcatagccgagaccggtgacgacgccaacccacagcaggccgctgagccagttaaagaactggaaacgacgattcggcaggccggaaatacccgccatggttggcagcagggtgcggacaaatgccagaaagcgcccggccagcagcgccagcaggccgtgtttatcaaacatgttggtggcgcgctggtgatatttgtgcggcagatgcgacagccagcctttcaccatattggtattacccagccagcgcccctgcaaatagctcagccagcagccgaggctggcggcggcggtcagaatagcgagagtggggacaaaatccatgacgcctttagcgattaacgcgccggcgagcagcaacaggctatcgcccggtaaaaacgaagccggcagcagcccgttttccagaaacagggtcgcgaacatgaccagatatacaaaacccacaacgtgagggtttgccaatgcggcaaaatcatgttgccacagcgcggcgacaatctcttgaatgacaaccatggactttcctaagtggtaccgtttttcgactagtgtactcctgaagcggcccgagcaccttgatctcgggcgcaacaaaagcggccgcttttcagaaagcgtccgcttttgttgccacttcctgtcactttacacgatacgcgcgaagcctgccgctaaatccgccagcagatcgtcaacattttctaaacctatgtgcagtcgaataagggtaccgctgaaatccacttccgcctcgggcggatggccgcgatatgttccggctggttggcgaggatcagcgattcgaacccaccccatgagtaggccatgctgaacagactgaagttatccagataggctgccagctccgcgtcggtcagacgtttattaaggacaaaagagaacagtccgctgctgccgctgaagtcgcgcttccagaattcatggcccttactgcccggcagcgccggatgattgactcgcgccacctgcgggtgctgcgccagccattcggcgacgcgcagactgctttcgtgatgttggcgcaggcgtacgccaagtgtacgtaagccgcggctggtcatataggcggtgtcggcatcgaccatctggcccatcagataagcgttttcacatagttgctcccagcaacgggcgttggccactgcggtgccgatcatcccgtcggagtggccaattaaatatttcgttgccgcctggatagagatatcgataccaaaatcgagcgctttaaacagcactcctgccgcccaggtgttatcgatcatgataatggcttccggcgcgacgcggcgcacggcggcgacgatggccggcacatcatgcacttccatggtgatcgaaccgggggattcgaggaacaccactttggtattgggttgaatcaggttggcgatatccgcgccaatgagtggatcgaaccagccggtggtcaccccgagtttcgcgaggatcttagtgcagaagtcctggctgggttcataggcggtgttggtcattaacacgtggtcgccctgttcgacgaaggccagaatcgtgttggcgaccgctgccgcgccgcaggggaagagggcgcagccggcgccgccttccaattcgcacatggcttcctgcagcgaaaagtgggtcagcgtgccgcggcggccataaaacagctcgcctttggcgcggttacgggtggcgtgttttttagcctcgacggtatcgaacaccagcgatgaggcgcgctggataacgctattcaccgagccctgagtatattttttgcggcgcccggcgttgaccagcgcggtatcaagatgtttatcagccatgttctgcaaacctgtttttatacgtctggacgtctaaactaacatgaatcccggtttgtgtaccgggtcgtaaacgatacaggtaaaaattttcccgaaaccggcgtcagccgcttttttactgcgtaagcgcaaagaaaataaacgtgatttgctgcacagtgtaaatactaatgagaaccactatcaattcgatgccgttttgatattattatgctcagtttttgtgattgacgtcctggagaaacagtgtgggtaataatttgatgcaggcggatctctccgtttggggtatgtatcatcacgccgatattgtcgttaaggttgtgatgattggcttgattctggcttcggtagtcacctgggctatcttcttcggcaagggcgccgaaatgttgtccagcaagcgtcgcctcaagcgtgagcagcagcagctcagcgaagcgcgttctctcgatcaggctaacactatcgcgaatggattccatgctaaaagtctgaccactcagctgattaacgaagccaataatgagctggaactgtcggcaggcgtggatgataacgaaggcattaaagaacgaaccggcttccgccttgagcgtcgcgtagcgcaggttggccgctatatgggccgcggaaatggttatctggcgaccatcggcgctatttccccgttcgtcggcctgttcggtaccgtctggggcatcatgaacagctttatcggtatcgcgcaaacgcagacgactaacctcgcggttgtcgcgccgggtatcgcggaagcgctgctggcaacggctattggcctgtttgccgcgattccggcggtggttatctacaacgtcttcgcccgcatgattgccagctacaaagcgtctctcggcgatgtggccgcgcaaattatgctgctgcaaagccgtgaccttgacctgaacgccagtggttctcagccgctgcgtccggcgcagaaattacgggtaggttgatccgctatggcgatgcattttaacgaaaacctcgatgataacggcgaaatgcacgacattaacgtgacgccgtttatcgacgtcatgttggtgctgttgattatcttcatggtggcggcgccgctggccaccgtggacgtcaaagtcaatctgcctgcctcatccagccagccgcagccgcgtccggaaaaaccgatttacctgtcggtgaaagcggacaaatcgatgttcctcggcaacgatccggtgaccgaagagagcgtgattgcctcgctggacgcgctgactcagggtaagaaagacaccaccgtgttcttccgcgccgacaaaaccgtcgactacgagacgatgatgaaagtgatggatacgctgcatcaggccggttacctgaaaattggtctggtgggcgaagagaccgtcaaagcgaagtaatttcccccaggatatctcccgaaaggccaacactgcgttggccttttttatttccccgacgcctgcgcatcgttttgatatggtccagctgcgatataatggcggccatttttacaaactgacaggaccttatggaacgctttctggaaaacgctatttatgcttcgcgctggctgctggcgccggtttatttcggcctctcgctgggacttatcgcgctatcgataaaattttttcaggagatattccacatcctgccgcatatcttcagcgtcagcgagtcagatctgattctgacgctgctttcgctggtcgatatgacgctggtgggcgggctgctggtgatggtgatgttttcaggttatgaaaacttcgtctcgacgctggatattaacgaaggcaaagagaagctcaactggcttggcaaaatggatgcgacatcgctgaaaaacaaggtggcggcgtcgattgtggctatctcttccattcatctgctgcgggtgtttatggatgcgaagaacgtgccggataacaagttgatgtggtacgtcattatccatctcacatttgtgctgtcagcctttgtaatgggctatctcgatcgcctgactaaggtaaagcactgatgtgacaacttacccggcagcttcgcgccgccgggtaaggcattacgcctgacgtttgtcttcggtctgcgtgtcgaaatcgcgggcgtcatggcgctcgtgcaactgctcgtcgagcgggccattggtgcggttaaccatccgtccgcgcttcacagccgggcgattgcccacatcctgcgcccagcgcagcacgttaacgtaactgccggcatcgaggaattccgcggcgttatagacgttgcccagcaccacgttgccgtaccacggccagatcgccatatcggcgatagtgtactcttcccccgccacaaagcggccgcgcgccagctgcttatccagcacgtcgagctgacgtttcgcttccatggtaaagcggtcgatggcgtactcgattttcaccggcgcatagttatagaagtggccaaagccgccgccgaggaacggcgctgcgccctgtagccagaacagccagtttagcgtttcggtacgcccggccgggtctttcggcaggaagaaaccaaatttttccgccagatagagcaggatactgccggattcaaatacccgggtcggcggagtggtggagtggtcgctcagcgccgggatcttcgagttcgggttaacttccacaaagccgctggagaactggtcgccttcgccgatacgaatcagccaggcgtcatactcagcgcctgctacacccagcgccagcagctcttccagcatgatcgtcactttctgcccattcggcgtgcccagcgaatagagctgcagcggatgattgccaacgggcagcactttctcatgcgtcgcgccggaaaccggacggttgatattggcgaacgcgccgccgttattctgtttccattcccatactttcggtggttggtagtgattgtcggacatactgacctgcctctttagtaaggtgtacaaaaatagtgaggtgtacaaaaagtctagcagctaatctcaggccataatccgcgcggcccacacgctgacgtcatcgccgctgccgagatcgggctgcaccaggccgttgaccataaacgtcggcgacacatggatgccgttctggcgggcgtatttactgtgccatttgatctcgttttgcagctcagggcgggcaaatgccgccgccagcgacacgtggctgtagcgctcaaggcgctcgataatttgctgcggggtggtattcatgttcggcccgctgcagtggtcggtgaattcaaactcttcacgatgatcggcgaccgcctgcaggactttgtgcgcctgctctctgccgtgcggcagggtggaggcggccagcacgcagcgcactatcaccccggaaaacagatgccacggctgggactgcaggcgaatcttaatcgtgacgttctcggcgcccacttcatccagcaattcatcaagcttattgaaggcgcgaacggaaaacggacaggttggttcgaggaatacttcaaaagtccgcggtccgtgtccccagaccagcggctgggcattgagatgcgaaggtgagctcattgtcgactcctgatgtagtgatgtttttttgttatgtgttggctaacaatatcacttctgccaatggacgccgggttattttctataagggcacgtttagcgaatcgaatgagtggtatcatcatttcacctctgtctggtaagtgcctgcggcaggataagaagagggagttttgttccgccaactgcccgggctgcattaatttgaggtcaggctaaatgagtaaaggatcgaccagtattgacgcccctttcggcacgcttttaggctacgcgccgggcggcgtggcaatttattcttcgaattacagtagcttaaatccacaagattatccggatgacgccgctttccgcagctatatcggcaatgagtatatggggcataaatggcaatgcgtagagttcgcgcggcgctttttattcctcacctacggttttgtttttaccgatgtcggtatggcttatgaaatattctcgctgcgctttctgcgcgaagtggtgaatgacaatattcttcccctgcaggccttcgccaacggctcgcgtcgtccgccgatcgccggttcgctgctaatctggcagaagggcggcgagtttaaacataccggccacgtggcggtgattacgcaactggtagggaataaggtccgtatcgccgagcagaacgtcatccacgcgccgctgccgcagggccagcagtggacccgcgagctgacgctggaagtgaaagacggcgtctacaccatcaaagatacctttgccgataccgaaattttaggctggatgatccagaccgccgataccgagcacagcctgccgcagccggtgctgcccggcgaggagatgaaaatcagcggcgcgcggctgccgaataaaggccagttccgcggtaactggctcaacgagaaagacgcgctgcaaaaggcctatgttgaagccaacggtcatttcatcaatcaggatccttaccagtacttcaccatcagcgagagcgccgaacaggagctgattaaagcgaccaacgaactgcacctgatgtatctgcacgccactgataaggtgatgaaggatgacaacctgctggcgctgttcgatattccgaaaattctctggcctcgtctgcgcctctcgtggcagcgccgccgtcatcatatgattaccgggcgcatggatttctgcatggatgagcgcgggctgaaggtgtacgaatacaacgccgactctgcctcttgccatacagaaggtggattgatcctcgaacagtggctgaaacagggctatcgcggtaccggccataatccggcggaaaatctgcttgaggagctggcgggggcgtggaagcacagccgcgcgcggccgttcgtgcacatcatgcaggataaggatcttgaagagaactaccatgcccagtttattcagcgttcgctaaccgaggcgggctttgagagcaaaattctctttggtcttgatgagctgcgctgggatgccgccggacagcttatcgatggcgatggccgcctggttaactgcgtgtggaagacctgggcgtgggaaaccgccatcgagcaggtgcgcgaagtcagcgccgatgagtatgcggcggtgccgattcgtaccggtcatccgcaaaatgaggttcgcctgattgacgtcctgctgcgccctgaagtactggtattcgaaccgctgtggacggttatccccggcaacaaggcgattctgccggtgctgtggtcgctgttcccgcatcatcgttatttgctggataccgattttgtggtcaatgacgagctggcgaaaaccggttatgcggtcaaaccgatctccgggcgctgcggtaataacatcgatctgataagcccgcacgatgaggtattggatcagaccagcgggcaatttgtcgatcgcaaaaatatttaccagcagctgtggtgtctgccgaaggttgacggcaagtacatccaggtgtgcactttcacggtgggcggtaactatggcggaacctgcctgcgcggcgatgattcgctggtggtgaaaaaagagagcgatattgagccgttagtcgtgctaaaagacgacgagtagcggccgcaaaccgggcagcggctagcatcgctgcccggcacctgcaaagcttcaacgtacaactaacacaacaacaagacagaaaaggaaaatcatatgcacgatcggcgcctcgccgcccgcgcgggtgaacttaagccctccgccgtccgcgaacttctcaaacacagtaaactgcccggcgtcatttcgcttggcggcggtattccggctccggaactgtttgataccgaaggtctcaacctcgcggtgcaaaaggtgatgagcgaacgttttaatgatgcgttccagtacggccttaccgaaggttatccgccgctgcgccaggcggtgagcgaaatctgccagtcgcgcggcgtggcctgctcggcaagccaggtgtatatcacctccggttcgcagcaatcgctggatatcgtcgcccgcacgctgctcgatccgggcgatgcggtcgtcgttgaacgtccgacctaccttgccgcgctgcaggtattccagctggcgcaggcgaatatcctgagcgtcgataccgatgataacgggatgctggttgaacaactggccgatctgctggagaccactaaggttaaagcggtctatctggtgccgacgtttggcaaccctggcggtaaaaccctcagcgacgatcgtcgccaacggctggtggcgttagcgaagcaacatgattttgtgatcattgaagacgatccctacggcgaaatcagtttcaccgataaagtgcgtcgtccgctgtatcaacatgcgatcgaacaaggctgtgaagatcgggtggtgtacacctccacgttctccaagatcctcgcgccgggaatgcgtattggctggatcgtgatgccggaatggctggcgcaccaggcggtgatcgtgaaacaggcggcggatctgcataccaatatgctctctcaggttatcaccgctgagtatctgggaatgaatcgcctgaacaatcagatcgccctgatccgcgaagactaccgcaagaagtgcgtggcgctggccgaggcgctggaaagccgtcttggcgagcatcttgagtttagccgcccggaaggggggatgttcctgtgggcccgtttccgctatccgttcgataccatggcgtggctgaaaaagacgctggaaaacggcgtggtttacgtacctggtgaagcgttctacaacgataatccggatactcgcaccctgcgtctttcctattcgacggtatctgaagccggtctgctgaccgccgtcgaacgtctggcgaaatcgctgtaatcttttgtctccgcaccgatgaccggtgcggagagctttaaatcgagggagggattactcctgctcggcgatgcgatcgtcaagccagataagcatcagggaagagagaaaagcgacagcaatagtgccaataaacaacaacataaaaatttcctcaggggttttattatttttctaatgtaaccggtgagtggctatttttgtttgcaatggtgattttagtgtcacgctgagccgttgcaagggtaaaaaaatcatcagcgtcaacatcgaaattcaggacgatttcccggtattttctggcgttaacgagttctttagcttctttcatactactggcgataatagtaggcatcagtttcatctcagtttgaaaactagcaggcaaaataaaagcttgttcgtatcagatcaacatttttttgctactttacacatcacctgaaagcctgtctttgcgcaatcgtaaccagagtggggcgaatgcagaagcggaggccagatgcccccgcaatacttcttaaagctggtactgccaggagaacaggaagcgcttttcggcttcatcgagataggtgttgttatcctgcacgtaggtcataaatttcaccgagttatgcgcggtcaggttatatcccacgccgactccggcgaaataacctttatagttatcgccatcgtcgtttttcgagccatacgccccccggcgaagcccaacaggcgtagatcggcgctcagtggtttcaggacaaatgcgccgagataaccgctgctgccggagatattcgtcgattcaaaaccgttctccggcgacggcatgccgttaaaacccgactgcgaacaggcgctatgttgatccttattacaggccatatggtcgccggtattataggtataaccggccatcgggaatatttggaagcctgcgggttcaaaaccaaaataactgagcggcaggaacgtgccgatagaatagttggtttgtgaggagtcatcgggataaacatttttcccaaaattaaagttaaaaataccaatgggaaatagccatgaaccgccgacgcgccattccgtggcgtcgctattaatacgcacattgagtttccgcgcttcgtcaaaggccagcgagccggaaaatgcgaggttgctgtcgttcagatcgtagttatctgaccacgtcacgccgaatttggtggtcactttagtcgggtcatccgccgatttctcggcgttggttttaacttcccccgtctgggcaaagagcgcgcctggcagcagaccgatacacagcgcgcataccgggagatatttaataagcataaaaattcacaattcaaaaaatcaaatacaaccaaacactgtacacgacgatattcatcgctaatatcaccgatatatttaattttgcatttgcctgtaaggcgttttaattatttacgctatacccgtcatacttcaagttgcatgtgcgttggctttcctcgctcaccccagtcacttactggagtaagctcctggggattccctgcgtcgccgccttcctgcaactcgaattatttagggtatataaaaaattaacccgcgcgcggcgggttaataatgtaaacgatattaaatagtatttatagcaggccaatctctttcgcggtgcggtcaacggcacgcttggttttttcaaccagttcatcgagttcgctatgtccggcaatcagcgccggcgccatgatcatgcgccccagcgtcgagcggataatcacgccttcttcaaagccgatggtgcgacagcgccaggccagttcgttctcattggcaaagcgtttgcgagtggctttatcttcagcaaactgcagggcggctaccagcccggctccctgcacctcgccaataagcggatggttttcgaacacctcgcgcagcgttttttgcagataggggccgctatcggtgcgaacccgggtgacgtggttttcatcgcgcaaggctttcaggttggcaatcgccaccgcggccgccaccgggtggccggaataggtcaggccgtgtgggaaaacgccgcctttttccaccagcacgtcggccatgcgcttgctcagcaccagcccgcccatcggtacgtaaccagaggtcagccctttggcaatcgatagcgtatccggttcaaaaccaaagtactgatgcgcaaaccattcaccggtacggccaaagccgccaatcacctcatcggcgcacagcagcacgtcatattgccggcaaatacgttggatctccggccagtagctttccggcgggaagatcatcccgcccgcgccctggaatggctcggcgataaagccggcgacgttttccgcgcccagctcaaggattttctcttccagttggcgggcgcagcgcaggccgaactcctgcggcgtcaggttgccgccatgcataaaccagtagggttcatcgatatgggccacgtccgggatcacgccgcccatttcatgcatgaacttcatgccgccgagcccgcttgccgccagggtagagccgtgatagccgttccagcggccaatcatcacctttttctccggcttaccgaggatctgccagtagcggcgaacggtgcgaatcagtacctcattcgattccgaaccggagttggtgtagatagcgtggctgtagtgcggcggcagcaggctgaacagtagctcggaaagctcaatcaccgccgggtgggtcgtgtggaagaacatattgtaatagggcagtttggcaaactgcgccgcggcggcgtccgccagatcctggcggctgtagcccaactgggtacaccacaggccggacattccatcgaggtatttattcccgtcgttgtcccacaggtatagtccttcgccgcgtacaatgacgcgcgccccttcggcgttcagcgctttttgatccaggaaggcatgaatatggtgagccgcatctgaatgttggtaatcggacgtcgaacggttctgattgcttggattagtcatttcgtctctcctgtctgctgaaactgaaaccaggtggttttgaggctggtgaatttatcaaaggcgtgcagcgacagatcgcggccaaagcccgactgtttgttgccgccaaagggaacggtgacgtccagcgcatcgacggtatttaccgaaattgttccggcggtcagctgcgcggcgacgcgatgggcgcggtgcagattgtcggtccacagcgaggcggccagcgcatagatatggttattcgccagatggaccgcctcctgctcgctatcgaaggcgcaaaccgccagcaccgggccaaaaatttcctctttccacagcgccatctcttcgttcacgtcggtcagtagcgtcggctgaacgtagttggcgacgccgtctatttccaccgtacggccgccggtaagcagcgttgctccctggtcttgcgcgcggcggatagccgccatcactttttcggcatgggtggcgctgaccatagcccccatgcggctttgcggttcgagcggatgcgccggagcccaggcctgcattttttcctgtagtttggcaatgaaggccgcgtaaatcgggcgctcaaccaacaggcgggagtttgccgagcagacttcgccctgattaaaacagatgccgaaggctgctttttcagcggccaggtcgagatcctggcagtcggcgaagatgatattggcgctcttgccgccgcactccagccatacctgtttcaggttggactgggccgaataggccataaaggctttgccgacggcggttgagccggtgaaggcgatgacatcgatatcgtgatgcagtcccagcgcgcttccggtttcggttcccagtccggtcaccacgttaagcacgcctggcggaataccggcctccagcgccagttcgcccagacgcagggcgctaaacggcgagttttccgagggcttgaggatcacgctattgccggcggccagcgccggacccaacttccaggaggcgaggtcgagcggaaaattccacggcacgatggcggcaaccacgccgatgggctgacgggtaatggttgccagcgctccgggcctggcgggagccacctcatcgtagagtttatctatgctttctgcataccagctgaggatgtgcgcggcgccggggacatcaatattcagcgcatcgttgaccggttttcccatgctgacgctctccagcagcgccagctcttcgcgatgctgaaggatcagcgccgagaggcgcagcagcgcgcgtttacgctcctgcggcgccagtcccgaccagacgccggaagtaaatgcgcggcgcgcggaggcgacggcaatatcgatatcctccgcctgtagcgaggtgacttccgccagcagcgtattgctggctggattaatggcgggacaggttttacggcttttcgcgacgtacggttgaccatcgatgatggcgtggctgataaagcgctgctcctgcagcctgcgctgccaaaagtttctatcagacatgaaccttctccttcgcatgttgcgtaattgttatttatttgtttctttgagttcatgatgcaggaggccaatgcggcgagaaaggactaaaaatctaggcaacctctataaaaatcgttgttagccaggattggctattttctgtgatccagggcgggagatcgggcgttgtgatggcgttcaaaaatcggggaggtgcaatttttcaataggctgtaatgcaaagagtttttatttgcggtcagttttctacaaccccggagcctgcgtgcttttggcgatattaaatattctcaaattaaggcgttaagaatataaatactacttaaggggaaatgaataacggtgaaacgatcgagttcatcagcctgttttcatgagcggcagcacgattaatacgttgtaatataaggtagttatatgccttgttttttctcatcctgcttatactgaccgaagtactatcctccggcgctcgcaattttttcgccaggtatctgttaattttctgtaaaaatctgatcgctgtcggattgttgatctttttcacggcagagggttgcaggccagggtgttcatcgtttaaagctaatcagcctgcctccttgatgataaaaaaataaggtatcacatgccccatttcaccctgaaacagctcaaatactttgttgccgtcgtcgaggcggaaagtattgctgaagcctcacgccagctgcatatcgcgcagccgtcaatttccatcgccgtgaagacgctggaagatatgtttgagcagcagttttttattcgccaccatgcccagggggtgtcgatgacgccgagcgggcagcgtttttatgaaaaagccaaagaactgctgcggctctcttatcaatttgaacaaaactcgaaggccgacaatgagctggtctccgggattatttccatcggttgtttcgaaaccgccgcgccgctgtatatgccgtcgttgatggccgggtttaagaaaatttatccggaaatcactattaaaatttacgacggcgagcagcacgagattgctcacggtctgcaccgcgggcgttttgacctggcttttctctacgacctcgaactggatacctcgatttataccgagagcctcaacgcgccgcagaagccctatgcgttgttaccggcggatcatccactggcccagcggcactccgtgcggttgtcggagctgagcaatctgccaatgatcctgttggatgtggtgccaagcaaaaactacttcatcagcattttcaaagataagggctacaacccgcaggtggcctacagttcgccgtcgattgagatggtgcgctgcatggtcggccagggctgggcttctcggtgctggtgacgcgtccggtgaatgacatgacctatgacggccagcaggtacgctgtgtggaaattcaggatgagatggcgaattcggcgctggtaatggcgcacctgcgcagtagtgaaccgactaaacccaccaaactgtttatggagtattgccgtaatgcggtactgagcccgccgcagcaggaagtgaaagtcgcctgaatgagcaaatttacctgctattgacgcgggtaaatatattcatgcggtattttctgcattttattgcctataaaaaaacgaggctctggcgatattttcatgagcctcgaaagttatggttatttttcctttcaaaatctcgtgcctgaaaaataaatactgcgtattcgcgcggcggaaatggcctgaaggcagggggagaccgctgcatcattattttattctcaggtactaaatttataataatttacctgtgcataacggtttattaacctcggtcatgagcagaacatcaccgaaggacatatttatgaccgtagaaaaaatacaaatcgagacgctggttgttggcgggggacaggccggtatcgccatgagcgagcacctgagcaaacagggtatttcgcatctggtcgtggaaaagaatcgcattgccgaagcctggcgtaccggccgctgggattcgctggtggcaaatggcccggcgtggcatgaccgttttccgggcatggagtttaaaggcggcgaccccgatgcctttattgccaaggatgatgttgcgcaatactttgtcgattatgtgcgcaaatttaatctcccggtgcgcaccggcgtggaagtcaaaagtgcggtgcgtaaccacggtcgtccggggtttaccattgaaaccaccgacggcgtgattgaagcgctgaatattgtcgcggcgaccgggccgttccagaagccggttattccgccgatcgccccgcgcgacagcgccatccatcaaattcattcggcgaaatattacaacccgcaacaactgccggaaggcgcggtgctggtggtgggcgcgggctcgtccggcgtgcaaatcgccgatgaactgcagcgcgcgggccgcaaggtttatctgtcggtcggcgcccatgaccgcccgccgcgcgcctatcgtaaccgggatttctgctggtggctgggcgttctgggcctgtgggatgccccggccagcgaacccggtaaagagcacgttaccatcgcggttagcggcgcgcacggcggccacacggttgatttccgtgagctggcgcatcgcggtatcacgctggttggtctcaccgaatccttcgccgggggaaccgtcttctttaaaaataatctcgtcgaaaacattcgcctcggcgatgaaaactacctggcgctgctggatgccgccgatgcttacatcgccgccaatggcctggatttaccggaagagcccgccgcacggcaattcttagcggacccggactgcatgacgtcgccgatcctgtcgctcgatctggcgcaggcggggattaacaccattatctgggccaccggctatgcggtggactacagctggctcaacgttaacgctttcaacgaacagggccgtcctcagcatcagcgcggcgtctccagcgaaccgggtgtctacttcctcggcctgccgtggttatcgcgccggggatcaacctttatctggggcgtctggcacgacgcgaagcatatcgccgaccatatcgctacccgccgtaaatatagccagtacaaagacgccagccagcgttaatcatgacttactgaacaggataaccattatgccgacccatactcgtattcggatgttcaataccaaagagacttaccctaatcagacgctggacaatgatttatgtcaggcggtgcgcgccggtaataccgtctacgttcgcggccaggtagggacggattttgcaggcaatctggtgggtcttggcgaccctagagcgcaggcggaacaggcgatgaaaaacgtcaaacagctactggaagaggcggggagcgatctgtcacatatcgtcaaaaccaccacctatatcatcgatccgcgctatcgcgaaccggtctatcaggaggtaggaaaatggctaaaaggcgtgttcccgatctccaccgggctggtgatttccgcgctggcgcagccgcagtggctaatggaaattgatgtaatcgccgtcatccctgatgacgcggcgaaataaggaggcagaatgacattttcgattgccgcacgctgcccggaaagcgggcagtttggtatcgcgatcagctcttcaagcattgccgtcggtgcccgctgcccgtggctgcaggcgggggtaggagcggtatcgagtcagaacattaccttaccggcgctggggcaactcactctggcgcagatggagcaggggctgacggcggagaaagcgatgcgtcgggcgctggcggaagacgactttagccgctatcggcagattatcgccatcgacgccagcggccagaccgcgtggttcagcggcgataaaacgctggggacctggcatgttgtgcagggcgataactgtatcgccggcggtaatatgctggcatctgaggctgttattgccgcgatggcggcaacgttttcgcaaaccgaaggcgagctggcgacgcggctggttgccgcgctgcaggccggtgtagcagagggcggcgaggccgggccggtccattcggcggcggtgaaagtggtagatgattactcctggccgctggtggatctgcgcgtcgactggagtgaaacggacccgattggcgagctggcggcgctgtggcaggcctatgaaccgcaaatgcaggcttacgtgacgcgcgcgctcgacccgcgggaggctcccagttacggagtacccggcgatgaatagtcgattacaggatattctggcgcggctgctggcgtttgacaccaccagccgcgaatcgaacctggcgatgatcgatgatattgccgattatctccacggcttcgcaatcgaaacgcagcgcttttatgatgcggaagggcgaaaagctaatctctatgcacgactgggccctgcggggcccggcggcgttatgctctccggccacaccgacgtggtgctggttgacggccagccatggacggttcccccttttgccctcacgcaacgcaatggccgctgctacggccgcggtagcgccgatatgaaaggcttcctcgcctgcgtactggccgccattcctgattttctcgcccaaccgctacgcatgccgctgcacctggctttttcctacgatgaagaggtgggatgtcttggcgtacgcagcctggtcgcccatctgcaggcgtcggcagagaaaccggcgatgtgcatcatcggcgagccgacggagatgcgcccggtctatggtcacaaggggaagctggcgatgcgctgcgatgttcacggccacgcttgccactccgcttacgcgcctgagggcgtgaatgcgattgcctgggcggcaaagctgattggccgcctggacgagctgggagagcagcttgcgcttcgcaaggattcgcgtttcgatccgcctttcagcaccctgcaggtggggatgattaagggcggcgcggcgttgaatattgtaccgcaacactgtcagttcgattttgaaattcgccatttaccggatgtgtcggtcgatgatgcgctggcctcgctgcaggcgtatgccgaaggcgaactgctgccaaaaatgcgcgcgacggcggcggaagcggctattacctttcaaccgctcagccagtatcccggcctgttgagcgacccgcagtcggcgttcgccggctggctggcgcagtgggccgaatgcgaggatttttcaacggtcgcttttggcaccgaaggcggattgtttgatgaggccggcgtggccacgcttgtttgtggtccgggaagcatggagcaggggcataaggcggatgaatttgttagcgaggcgcagttggaaaagtgcgcgcagatgttgaaaaacctctgccgctggatgtcagcttaaacgccggcgcgccgcaagggcggcgcgctttcttgtagtccttaaaccttctcttttgcaaaagccatgcttttaacactcttcgctttcgagaaataataatagaccggtgagaccaccaataaacctataatccaggagaggtccgcgccgccgaaggtgagggcgattggcccggtataaattgaggtcgacataaacggtacttcgaccagaataccgaggatatagcaggatattgccgttgcattaaagtagccgtaaataccgccatcgcgtttaaagaaagactcaacgtgatattcgccatgggccactaaataataatcgaccagattaatcgccgtccacggcaccagcacatacagcagcacggtaataaagttagtgtagattagcaggaaattttcctggccatagatggcgaggaaaatctccagcagcatggtcaaaatagcggtgataatgcgcgcccgcgccatcggcgaccagccgtcgataaaagtctggccgagcgtcagggtacagagtacgccgcagtacagcatcatcgagttggtggcggcgatccccagcgccagcacgataatcactatcgcccccatgctgccggtcagatccataatcccttgaataatatcgtcattaccgatacaaatcgccaccagtaccccgagcaccatcggcaaataggagccgagaatgcagccaaaatagctggcgtaaaagacgcttttatcgttggtgctgtagggcatatagcgggaataatcagagacatagggcgcataggccagctgccagagcgcggcgatagacacggcgccgaggaaaccgacgatgttgaagccgccgcggtcgataaaatcgcccggcaggccatggatgaagactatccacacgaaggttgccgccagtacgatgccggaaatccacgacattatccgcgcgtaggagtggatgatcttatagccaaagatggtggcaaacaggcttagcgcgccaaccacgataatcccaatgtccgagttcatcggctgataaatcgcgtgcatcgactgcccgccgagtaccagactggaggcggtaaagccgatatacatcagtacgacaatcgagaccaccagcacggagccataggatccgaactggcccttggtctggaccatttgcggcaccccgagttttggcccctgtgccgaatgcagcgccataaagagcccgccgaccagactgccgataaatagcgcaatcactgaccataaaaaggaaaggtggaaaatcgtcaccgacatcgcgccggtgatgaccgttaacagcataatgttggagccaaaccaaatggtaaaaagatcgcttggtttgccgtggcgcatatttaaggggataggtctgatggtattactttcaagattctcgacattaacagattgatgttttgtcatggtgctctctcattattttggtcttcatcagcgtaagagtgatatttcaatgaggagtacagctaatctactcatcacaacatttcattcaccatttttacaactccgtatcatttgcgaaatgacaaaaaatatcggtgctggatataaaaaaaatgctttacctggcgctggaaaaacgctgcatttgtgcgttgcgctatttttagagttttatgctttgtgcttaattttttactggcaaagcagctgatggttttttatcgggcagataaaactctgccatattgcgaggggagtagaatgatgaaccatagagagaaataacaattccctgtttttattatggtcttgtgaggtagaggattggtcccataaaataatggagaaataaaataattatctgatacatcatgacattagtattatcgtgttgtgtatcctaaaggcgcacaaataacagggtgaagtgcgttatgcgaggcgcctcacaataaccaacagatattcaatataagggcaggaatacgacatcctgcccgaaaataattaataaccgactttataaacccgcccgctttggatcccttcgacgctgcggcggtaggcctgtgccaccgctgcggccggtacgctggcgaaaccggggaaaaagccgtcataggcttcgacggattcactgagcacggtggggcttatcaggttaatgcggatcccgcgcggtaattcgcaggcggcagcgcgaacgaagccggccagtccggcgttaacggtggtggcattcacccttgagcgatgggttcatcggcgacgatgccgctgataagggtgatggaaccgccatcgttgagataatgctggccggtgagggcgaggcgaatctgccccagcagtttatcctgcaatccctggtcaaaatcacggtcggtcattgtgcttaaggggccaaagtacaaactaccggttgcagagacgatggcatcgaccgggccaattttctcgaacagcgcctgcacgctgtgctgtgaggtgatatcgaccagctcgtcgccttgggtgcggccaacgcggataacctcatgctggcggctcagttcttccgcaaccgcgcggccaacggtaccgctggcgccaataacgataattttcatcgcaaactcctcagttgaagtgaacctctattctttaattaatcgattatcggataaactggctaaaagttagatgattgctaaccagaggtttgtaatatggacaagctgcgtggaatggagacgtttgtcgcagtggtggagtgcggcagcttcaccggggcggcggcgcgtcttgagatgtcggcggtgatggtcggcaaatatatcgccttacttgaaggccagctaggtacccgcctgctggagcgaaatacccgccggcaaagcctgaccgatgccgggcgagtctattttgacgaggcccgacgggtactggagcaggtggcgaatgccgagcgttcggttgaaaggctacggctggcccctgccggtacgctacgggtgagcgcgccggtttctttcggcgccagtattatcgcgccgctgaccgcctcctttctgcaggcctggccagaggtacgcgtcgagcttgatttgacgaaccgcatggtggacctggtagatgagggaatcgatctggcgattcgcatcggtgatatccagcgtaccgatctggtggcgaaatatctcgctccctatcgcatggcgatctgcgcggcgccggattatctggcgcgccacggcacgccgcagacgcccgctgatttagccgggcatcagtgtctttcgcatacggtgtggaccgcgcgcaacgagtggcgactgccgggcgctgcggaagaagtgcgctggaagcgcgacgcggtgctgcgctgcaacgatggctacgcgctgcgtatggcggcggtggccggcgccgggctgttattgcagccggaagtgttgctggcggaagatttagccaatggccgactggtgcgtattttgcaaaattacaccccggaaccgagaccgatacacctgctgtggcgccaggatttgcgcccgttaccgaaacttacccgcttcgtcgagcatttgttaaaggaagtaaacggtatttataagctatgattatcgtgtctgatgaaagtactcatcgtgaaacagtaatggaggtatggatagatgggattattaagttttgtgaaagaagcgggcgagaagatctgggatgccgtgtccggctccagcaaggaagatcaagccgacaagctgaaaaaacatattgatagtcttaacctgcctggtgccgacaaggtcaatattgccgtagcggacgatggtaccgcgacggtaacgggcgatgtcggttcacaggaagataaggaaaaaattctggtggcggtaggtaacgtaaccgggattggccaggtcaacgatagcgttactgtgacgcagagcggagcggaaagccgttactacacggtcaaatccggtgataccctcagcgccatctcgaaagcgatgtatggctccgccaatgactatcagcgtatttttgaagccaataaaccgatgctgaagcatcccgataagatctatccggggcaggtgctgattatcccggcgaagtaagccgtgaatcagggattaatagcaacgttttgatggagtctgtaatgggattattagatcaaatcggcggcgtgcttggcgggcaggctggcaaggctgaacaacttcaggcgatcatgacctggattgaacagcagggcggtatccaggggattctggaaaaattccgcagcggcggcttaggtgaaatcgtcgagtcgtggcttagtcagcagagtaatatgtcggtgaacagcgatcagattacctcggtgttcggctcgcctgcgctgcaggatctcggcgccaaactgggcgttgattcgcaaaccgcctcatcgctgattgcggaatacctgccaaaaatcgtcgatggcctgtcgccgcagggcgaagcgccggcccagggcgacctggtctccgcagggcttaatctactgaaaggtaagttatttagttaaacgcttgccgtttgagttttaacttatcacataatacgggccagaataacggcccgtattttattatccgccataaattcaccgcgtcgcgattatttattctgtattaataattgacaacttaccgcggcgttgaaaatatcattatttaatcttaccggaacggttatgataaatttttatgatatttatcaggtgtcctgatgggctaattagtttttttatttcctgtagccataaacaaagtaatttacccttttgctaaataatgcgcattatctccaaaacataaaaacacctgcacatcacaaccattattaatggttcctgactttggagaatgctatgccgaccaaagaatcatcgccgccgcttattgagaagcacactattggctatattccgccagaagatcgccacggtaaaacccgcgatctctttaccctgtggtttggtggcaacatcgcgccgctaccgatcgtcacaggcgccctggggtacagatctttcacctgaatctgctgtgggggatcgttgcgattttagtcggccatctggttggcggtgcgctgatggcgctgcactcggcgcaggggccgcagatggggatcccgcagatgatccagagccgcgcgcagtttggatcttttggttcgctgctggtggtggcgatcgccggggtgatgtacgtcggtttctttgcctctaacatcgtgctggccgggcagtcgctgcacggtatcgcccccgcggttccgctaccggtggggattgtgatcggggcggtgggatcctgcgtgattggcattatcggctaccgatgtattcacattctcaaccgaatcggcacctgggtgctgggtatcggcattatggtcggctttggctacatcttcactcatctgcataccaccgatttcttaacccgcggcggcttttccttctcgggctggctggccaccgtgtcgctggcggcgttgtggcagatcgccttcgccccgtatgtttctgattattcgcgctacctgccggcggatgtgcccgtcgccgcgacgttctggaccacctaccttggctcgacgctcggttccagtctgtcgtttattttcggcgcggtggcggtgctggcgacgccggtggggctggaaaccatggatgcggtaaagctggcgaccggcgcgatcggcccgttgatgctggtactcttcctgctgagcgtcatcagccataacgcgcttaatctgtatggcgcggtgatgtcggtgataaccctggtgcaaaccttcctgtggcgttggatccccggcagccgcagccgtgcgctgctgtcggtcatcgtgcttatttgctgcgtggtggcggctatcttcgcctcggcggactttatcagccattttatcgatctggtcctggccctgctggtggtgctggtaccgtggaccgcgattaacctgatagatttctacgccattcacaagggcaactacgatattaactcgatatttcaggtggatggcggcatctatggtcgttacaacccgcacgcgctgctggcctacgccatcggcatccttgtgcagatcccgtttatgaatacgccattatacgttggcccggtctcggcgtggtttaacggcgccgatctctcctggctggtcggcctgctggtgacctcgccgctgtactattggctggcaagccgcgatagcgcctggcgtcgccgtcaggttagcctcaagcaggcgatggattaagttataaagcggagcgccgctggctggccttacggtactgcagcggcgtctggcgcatcatctttttaaaacaggtaatgaagtaggtcacctcgccaaatcccaccgccaatgcgatggcatcaatgctctcatcgctattacgtagcagatcgcaactgcgttttattcgccgggtgagtaaatattcatggatattgccgccggtctgctgacgaaaaacccgcgaggtatagctgcgtgaaagtccgaggtcgcaagccaactggtcaagagaaaacttgctggcatagtgggcttcgatccagttcattatccgcgaggcgacggtctgctggcgcggcgggtagcgttgcggctgctcgggtagaaacgtcattagctgcatcaccaggaacgccacctcgctggcggtggtctgcccggtaccctccagacgctgaaactgttcaaggatcctttcgataaaggccgcgtgctcgctgagatcgtaaatttgcgccggcagattgctggcggccagcgcggcgaactgggcctgatggcgtgggaaagcgctgagcgcactctcgacgaccgactgctcaatgtgcatggtggtgcggtgataagggttcttatcgctatgatcgacctgcactttgtgcaaacggaagggcggaaagataaataatcgccccggacgggcggtgtagtgctgattatccaccaccacgatgccgtagccgctggatatataaagcaattcaacgcattgatgccagtggtagtaaagcacgctggtggtatacatgcgattaaacgaaatggcctgccgatcgagcgtaatacgttccagcagttgcgcttcgcccattttgcctccaggacaacagatttaaatttttacgccatcatttgcaatttatcctccgcgcggtcgacaaaatccagcaaaaatgaaatagcggtttaattttgtgagtccgctcactcagcgccgggaataaaagcggttactcttcatccagacgtcgcacacgtggcttgataaaagcctaataacaataacttacctctaccctcgtgttatacggaggaccctgtgcaacctgaaaacatttatctggataacccactgacaagccgggaagaggtgctacggctggtcaatgaaatgttgaacgcggtggcgtcatattttaaaagcgacgccagccgcattgatttagcgaacttcaccgctcactacggccagcaggtcgcgagcatggaaaccttttcccgtctgctgtggggcgtgacgccgctgttggctggcggcagcgagccgcagcatttctccttctatttacaggcgataaaaaacggcaccaatccgcagcatgccgattactggggcgaagtcgcgccttacgatcaacgcattgtcgagatggcggcttacggactattgctggcgttggcgggcgaaaccgtactggcgcacttcaacgctgtggaaaaagagaatttatggcgctggttaaagcagtgcgagacccaggatatcccggataataactggcacttctttccgattctggtgcaggttggctttcattattgcggtatgccgaccaatccgcaggcgcgggaagatcattttaccgccatggaacgttattacctcggcgatggctggtactcggacggtccgggccgtccgcgcgactactacatctcgatgggcttccatttctatggcctgatttacgcgaagctgatggccaatgtcgatccgcggcgctgtgcggaactgcgtcagcgggccgcgcgtttctcctctgacttcatccatttctttgccgatgacggcgcggcgatcccgttcggccgtagtctgacctatcgctttgccgaagcggcgttctggagcgcggcggccttcgccgggctggaagtcttctcgccgggcgtgatgaaaggcatcgtgttgcgccacctgcgctggtggctgaagcagccgatgttcgaccgcgacggcgtactgagcgtcggatacagctacccgaacctggcgatggcggaagattacaacgcgccgggttcaccgtactgggggctgaaaaccatgctggtactggcgttaggcgagggtgacgccttctggcaggcggctgagctgccgctgccgccgctgcccgcacagcacacgatagcccatgcggatcaggtgctggtacatcaggccgatcacctgtggatgctaacttccggccagctggagctgaacaacttcgttaataccgaagcgaaatactgcaaatttgcctactccacccgctttggtttcaccattgagcgggggcgctacgggttgaaccatgccgctcccgattcgatgctgctactggccgaaaaggataattactggcgcggccgccgcgaatgccagaaggtggtcaccgctgacggcactatttacagccgctggctgccgtggcgtgacgtggtgattgatagctggctactggcgctgggcgactggcagctgcgcgtccatcgcataactacccaccgcgcgctggattgcgcggaaggcggctttagcctggcgaatcgtccgctgccgcaggcgcaggagcgtgacggcgcctgctgtttacgcaacgcccgcgatatctcggcgattttctgtttacatccgcacgcccgccgtggcgagacggtgctgacgccgccgaacagcaatctgttgttcgccgaacgtgcggcggtgccagtgctgcgcggtgagctcgatgcggggacgcattgcctggtaagcgcggtatgggcggggaatgccgccgacttcgaaccgcaacactgcccacaggccttcattagcgatgacgcggtacgcttcgtgacggcacgacaagaaacgacgctcgttctggccccggaggcatcgctatgagcacatcatcgtccgtacgcgccgcgcagtacaaaatgagtacctttatttttctctacttcttcacctggtcatccagctttggcctgtacgcgctgtggctgagccagaaggtgggcctcgatagcattaccatcggcagcgtgttcgccattaatggcgttttcgctgtggtcctgaaaccggtgtatggctacatcatggacaaaatcggcatgagcaagtggctgctctattttgtctgcgccatttccgcactgatggcgccgttcttcgcgctggtctaccagccgctgctgcaaagccacgcgacgctggggattatcatcggcgcgctgtatctgagcctcggctggtacgccggggtggcggcttccgaatcttacgccgaccgctttagccgcctgtacgggctggagtttggccgcatcagaatgtggggttcgctgggctgggcgatggcggcttcggtctccggactgctgtttaacttcacgccgctggctaactttttgctcagcagcggcacctcggtactgatgctgctggtgctgattagcctcaaaattggtgatgaacagctgcgcaataacaacgtcatttccgcgaataagatcgtctttgccgatgtgctgatgctgctgaaaaatcgcaaattctggatgttcagcctctacgtcgccggagtcgcgtggatgatgttcatcgccgagcagcagttcccgcgctatttcgtctcgttctttgccaccaaagagcagggcaacgcctggtacggctatctcagtaccgtacagtcggggatggagttcgtgatgatgatgtttatcccgtggctggtgaaccattatggcgccaagcgcggcctgctgttctgcggctgcgtggtgggggcgcggctgattgcctccggcttgaccaacgacccgattgtcatctccatcatcaaaccgttttacggcgtcgagatcgcgctgctgctgatttcagttttcaaatacatcgccgaacacttccatcgtcgggttaacgccacgatgtacctgctgggttaccaggcaatgatttacgtcggatcgattgtggtcgcgccgccggcgggttacctgtacgacaaaatcggctttgagcatacctatctgctgatgggctgctgcgccctgacgtttacgctgatttccgcttttacgctatcgcgctgccagtcgaagcgcgatgcctcacgaccctttactccggctttagataccgcctcggttgaaccggccaaacattaattcaggagttgttatgaccaaatcagttatcaccgaagcgctgcggccgatcgaactgcatcaggttgaccgcctggcgttgagccagaagctggaagacgcgctggaccgcgtgacgcgcaagctcgacaaaaatatcgtcgccttcggcgataagttccccggcgaagcctgtgaaaacggcatctggccgcgtaccgataacgtagagtggaccaccagtttttggccgggccagctgtggctggcgtgggagatgaccggcaaagcgcactaccgcgaagccgccgagcgctatttaccgtcgttcgcccggcgtattgagcagcgtatcgacaccgcgacccacgacctcggcttcctttattcgctctcctgcatcagcgcctggcggctcaccggcaatgaagccgctcgccagtcggcgctgctggctgccgagcgcctgatggagcgttttaacccgacggccaaaattatccaggcgtggggcgatttaaacgatccggaacagcaggggcgaatgatcatcgactgcaatatgaacctgccactgctgtattgggccagcgagcagaccggcgacccgcgctacgcgcaggcggcaacggcgcacgccgggcaggcggcgaattatatcgtgcgtgaagacgcttcgacttatcacacctactatatggatgtgcagaccggcgaaccgcgctttggtaacacccatcagggctacagcgatacctcatgctggtcgcgcgggcaggcgtggggcatttacggtttcctgctgagctatcagcacactggcgataagcagatggttgagctgtcgcgcagcctggcgcattacttcctcaaccgcctgccggaagatgatgtctgccattgggatctggcgttgctcggcaccgatgccgtgcgcgacagttcggcggcggcgattgccgcctgcggcctgctggagctggtcaaggcgttgccaacgctcgacgccaaccgcgcgtattacgaagagatggcgctgcgcattgcgctgtctctgaccgacaactatctggcccacgacgacacgccgaccgaagggttgctgcagcactcggtatatcatatgggcagcggcaagggcgtcgatcaatgctgtagctggggtgactatttctatcttgagctgctggcgcggctgcgacagatttggtacccgtactggtaaccctcaaggaatggagagcaagatgaaaagcgtagccgtattattagcccccggatttgaagagggggaagcgatagtcactatcgatatcctgcgccgtctgaatattgcggtgcagacgattgcctgcggcgagagtcgcgaagtggtgagctaccacgctatcccgatgatagcggatagcaccctgaaggccagcttcgaccgaacctttgatgccgtggtgttgccgggcggcccggaaggcagtgttaatttggcgaaaagcgcggaggtcattgccttcgttcgccgccacgatgaagcgggcaaatatatctgcccgatttgctccgccgccgcccgcgtgctgggcggcaatgggctgctgaaggggcgtcgctatgtctgttccggcgatctttggcagcaggtgagcgatggcgtgtacgtggatgccgacgtagtggaagacggcaatctgctcagcggccgggggctgggcaaggtgtttgatttcgcttttaccctggcggcgcggttacagggcgatgaagcgccggcgcgcgaacaggcggaacatatttattatccgtggtagaggaaaatagccagtgactgctaaaggcgccttagtggcgccttttacttttgtagcgccctctcatgtcgcctggttattagcgcgtcaaggattgccttaatctcacttaaatgatattaattatcattctcataataaaaacataataacaatattaatacctggcaaggatgtgagcttaacgaacaaccactttaagttaggcatgaattagggaataggtatgagaattaacaagatcctctggccgctcaccgcgcttgtggtagggctgaatagcccgctatccgccgccaaatcttccgacgatagcgatgaaacgctggtcgttgaagccaccgcagaacaagtacttaagcagcagccgggcgtttcaattattaccagtgaagatattaaaaaggaccctccggtcaacgacctctccgatattattcgcaaaatgccaggggtgaacctcaccggcaacagcgcgtcgggtacccgcggtaataaccgccaaatcgatattcgcggtatggggccggaaaataccttgatcctcattgatggcgttccggtgacctcgcgtaactccgtacgctatagctggcgcggcgagcgtgatacccgcggcgataccaactgggtaccgccggaacaggttgaacgaatcgaagtcattcgcggcccggcggcggcgcgctatggctccggcgcggcgggcggggtggtgaatatcattactaaacgcccaaccaatgactggcatggctcgctctcgttatacactaaccaaccggaaagtagcgatgaaggggccacccgacgcgccaactttagcctgagcggaccgctggccggcgatgcgttgacgatgcgtttgtacggcaacctgaataaaaccgatgccgacagttgggatattaactcttccgcggggacgaaaaacgccgccggccacgaaggggtacgcaacaaagatattaacggcgtcgtctcctggaaagtgaatccgcagcaaattctcgattttgaagccggatatagccgtcagggtaatatctacgctggcgatacgcaaaatagctcttccagcgcggtgaccgaaagcctggcgaaatctggcgcagagactaaccgcctgtatcggcagaattacggtattacccataatggggtctgggattgggggcaaagccgctttggagtctattacgaaaaaaccaataacacccgtatggatgaaggtttatccggcggcggtgaagggcgtatttcggcggatgagaaattcaccactaaccgcctgacttcctggcgcaccagcggcgaactcaatattccgctggatctatgggtcgatcagactctgaccgttggtgcggagtggaaccgcgatgagcttgacgatccctcttctactggtttatcggtgaatgataataacattggcggtattcccggttcagcggcggatcgcagcagtaaaaatcattcacaaattagcgccatctattttgaagataatattgaaccgacacccggtaccaatattattcccggcctgcgttttgattatcttaatgaatccggcggcaactttagccccagcctgaacctgtcgcaggaattaggtgattacttcaaaattaaagccgggattgccagaacttttaaagcgccaaacctctatcaatccagtgaaggttatctgctctattcgaaaggcaacggttgccctaaagatattacttcaggcggttgctatctgataggtaataaagatctcgatccggaaatcagcgtgaataaagaaatcggcctggagttcgctctcgacgattattatgccagcgtgacttacttccgtaacgattatcagaataagattgtggccggcgatgatattatcggacaaaccgcttccggcgcctatatcctccagtggcagaacggcggtaaagcgttagtcgatggcattgaagccagtatggcgttcccgctggtgaaggatcgtctgaaatggaataccaacgccacttacatgattacctcggaacaaaaagataccggcaacccgctctcggttattccgaaatacaccatcaacaactctctggactggacgattacccaggcattttccgccagcgtcaattggacgctgtatggtagacaaaaaccgcgtacccatgcggagtcgcgcagcgaagataccggcggcctgtcgggtaaagagctgggcgcttattcgctggtcggcaccaactttaattacgatattaataaaaacctgcgtcttaacgtgggggtcagcaatatcttcgataaacagatctatcgttcatccgaaggggcgaatacctataacgaaccaggtcgggcatattatgccggagtgacggcgacattctgatcgcatcgtcatcagtatactgcccgcaaccgcgcgggcagtatcaacacaggattatggacagctatgctggttggatgctttttcgcgactcatatccagcagcgcgctgtggaatgaggcgttaaacatcggcccgtgccccaggccagggaaatcccaaaaggcggcattaacccctttctctttcagcgtggcgagggtggcatgtactttagttagcacttcggcggcgtgtgttgcccggttatcacccggcgtcgccgaaccctccataatggccaggcttttggcgcaatatgatgccggctcgaccgccgtgattcggttcagcagggcaaagttgtcccggccaagcgaaggactggcgctgtaatatgaatggaagaatgaggacgaaagccaggagtcgagcgcgaacaggccgccgtatgagtggccccacaggccgcggcgctgtgggttgattttcagcccttgctccgccttagcggctatacgcgtttccagtaattgacggaagtcttcactgccgccgcttttgcggccaacatatgtttcattattctttctgactgccggcgtatagtcgtaggcccggccgttaagatcgaatggcaggttggtctgataaccgaccgcgacgatcaccggcggcgattgcgccgccagctgcttgagtagttcgtcagacaggcgatccattaccgcattaccatcaagcatatatagcacgggatagcccgttggtggcgcggctttatttggtatggccgtccatacccgatagtggcgagcgccgtcggcggaatcgaactgattgacgctgaagtggtaaaacgctgaacccttatcggcgatattgggccccaacggctgcatatccggttttgctaagcctgaagcgctatagctgagggtgaggcaagaaagaacggcaaaaagcgccttgcgcgggcgcgtagagcgagactcgcgggcatacatctgatgattattccttttccgcaggtgaaattttagttattcagaaagcacatacagttgcctgaaagcgcttgttggtcaagtcaaccctgcagtaagccgagcccatcaagcaaggcgccgcgccaccaggcgtaatcgtgcccgccggtgtaaatggcgcaatgactatcaacgccggacgcctgtagctgctgatgaagccgctggacgtgaggcaccgtcgaaccttccagtgagcccacacacaggcggatacggacagtacgcggcggcgcagacaacacatgttcgctgacccaagaagtatcggttgcgctaaataaatgggggcgactgccgccatctggcgtccaccacatggaaggcgaatggctgagcaccagaccgaaagtttccggcgcatggcgggcggccatcagcgcgctgacgccgccgaggctctgcccggccaggacggtgcgtgagcgatccgcccatttttgtcgcggctgttcgcggcgaatggtcggcaggagatgttccgcgacgtcccgtatcagttcgcagcgcccgccgagtattgtggtgcgctcgcgctcatcgatattgtcgatacccagcagcgccacgggaacaatgcggcggctatcgatcgcggcgtcgatggctgcgcacaccccaagatgatcgaaccaggtttcgccatcgggcagcaccaccagccccaacggctgcgacttatcaaccgcgggcaggtacaggcgcacctgccgtgattgtccggcaacgatccgttctgaggtcagcaaggtgccggcgtggcggcctccgcgccattcggattgagcgggggcgttatcaagcgccagcaccgactcccgcacgccgtcgcgaatagcgatccccggcgtcttattgagcggatcggcctgtccggtgagagcggcaaagcggctcccaagctgattaacaacctcttccggcgtgcctggcgggatctccaccagtgaataagagccgcaatagctggccggcaggcgcagcgtcagggtccagatatccgttgcgggaacctgcgtcatcaacccctgtgacaccttttctttgtcggttacccggttcaatcgcagataaacgcctctgagcggatggcgggcgcgccataaaaaagtgacttcacgttcattggctgcgccgtccaccgttgttactagcggtaccggcagcgatgcggcctgctgccagaaatgagaaagatcggtaatgttgccggtagccaactggcggcgcaggccggcgatagccgctgaaaccggcggatgtggattgatattgaacattctatctctttgaaaaatcatgctaccagtaaaaatagctaaagcggctgttcagcgaacagacgctttaggcgtattgattaaggtctaacgcttaccatcactatcccacgatttctcccgttatgtcgtgttggttgcgtgcatctgccgggccgacgctatcgcgccataagcgggcgtagaggccgttcgccgcaagtaattgctcgtgtgtaccgtattctgcgagccgccctttatcgacaacggcgatcagatcgcagcgctgggcggtggtcaggcggtgtgccacgattagcaccaggcgttttctggcacgggcgacttcggttaacgaagacatgaggcgctcttccgcgcggcgatccaggcgcgatgtggcttcatcgagcagcaggacgtgggcattcgccaactgggcgcgagctaacgcaatcaactgacgttgtccggcggataaatccgcgccgccgttattgactggcgtgcggaaaccttgcgggagctgacgtaccagctcaaacaggcctgcctgccgtgaagcgatctcaacttcggcattgctgctggatggtcgcgaataacgtatattctccgcaatatcgccgctaaagagcgcaacatcttgatcgaccagcccgatctgacggcggtaatcggcaagggttgccgccgtcatctgtcgttctccaatgccgatcgtcccgctggtgggtgaatagagtccggcgataagtttaatcaatgtcgacttcccggcgccgctgcggccaacgatcgccacgacactgcccgcggggatggtcagagtgagcttgtccagcgccggctcagggttgccgggataacggtatgtaacttcatcaagctgtaatgcacccgtggccggcggggtggaagaaggagtgacgttttccgtctcttcggtcgccagcagctcatcaatatgtttaccgctggccgtcgcctgctggaaggagtccacaatcccggataattgctgtaccgggccataaaactgccccagcaacaggaagaacgctgccagcaccccggcggtcatttcgccttcggccaccctcgatgcgccaaccagaagcacggcggcataggaagcctcggtacagaaggtcaggaaggggaagtagaccgcaagatatttctgcgcgcgtacgcgggtagcgcggaagcgatccgataatgcgcgcagccgggcggcctcttgctcctgttgaccgtgggattgtacgacgcgcaggccggagactttctcctgcagagtgctattcactttgccgatttcaaggcgcgcctgggcataggccggagagctcaggcgacgataaacccaggtcgccagcgcgaccactggcaccgcgcttaaggccgtcagcgccagaatggggtcgagccagaacatggccgcggcgatagcgaacatcgtgaccaggctggtggccgcgccggcaagaccgttttgcagaaaacgggcgagggagtcgacatcaacggtcatccgggtcaggcgtgaatcaacgtgcttttcatgccaggggagggcaaggcgcagcatatggccgaagctgcgcaagcgtaccgtatgttgaaccgactcggccgctctggcggcgaagatggtctgtagtgaataacaacaccagcttataaccaccaggcacagggcgagcagggcgcagacgccgatagtcgccatatcgcctgcggcaacccccgagtcaataccgcgctgcagcagtattaacacgccgacgccagcggcagaatccagcgcgatcagcagggcggcgatgatgaacatccacgccaccggccgcagcagcgaggtcaatctacgcccctctccggccagcgcctgctgaaccgcctgttccggcacgcgggtcatgcaggcgacaaaaccgttgccgtcaacttccggcaacgtttgcggctcttcgttctgcatcgctggcgttgttggccacagatcgcggcagccgccggcgccaggttcgaggaactccccgtcgccggtcatcagcgcgcggaacgccgggcagcgagactcaagctcagcctggctgccgatgtccaccacttgccctttatccaacaccacaattcgactggccaaccgcagcgtcgcccggcggcgggcaatcaccagcagcatgtgctggtcatcggcgtaacgacccagcgcggcattgatctccgcttcggtaccggcatctaccgccgatgtggtgtcatcgagaatcaacagttccggtgcggtaatcagcgcccgcgccagcgcgatgcgttgccgctgtccaccggagaggttggtgccgcgctcggttaggcgggtatcgaagcctttcggtaaggcattgataaactcgctggcgcctgccgccgccgccgcgcggcgaatatcttccatcgtcgcctgcgggtggccgtaggcgatattttccgcgaccgttccggcaaacagaaaggcgtcttcaaataccacccccacctgacggcgtaacgcctcaagcttgagatcgcgaaggttctgccgaccggcgctggtgtttagccaaatatcgccagcgctgggatcgtaaaagcgcgccagtagcattagcagcgtcgatttaccggatcccgacgcgccgactaccgccagcgtttcacccgcctgtagggagaaggaaacgtcgctcaggatacggctgccactgccataaccgaagttcactttttctagctgcaggccaataacacgaccattgagcgcttcgctaccgtcaaccatttgcgaacgggtgtcgatcagagcgaatacccgttctacggatgcctgggtacgttgggcgatcaccaggaatgacgccagcacacgggtaggtccggtcaacatggcgaggaaactggcaaaggccacgaatgtcccgaggtcaattcgcccgtgcatcactgaccagccgccgtagcacagtagaacgatttgcccgagaaccggtagcgccagcatggtagcgccaggcatcgcctgcgaaatggccgcgccgatgcgcacgcgcaccatctgccgcgactgacgatccagccagcgcgtttcgcgcagttccgccacgcaggatttcaccaccgagatctgcgccagaacttcgcgcatgtgctcggtcagattcgccagccggtctgaagccagccccgtctgagcgaatacccgacgacgggcgcgcagcgcggtaatggcaagacacgccagcacgcagaccacgattagcgtcatggccggcgacatacacagcatcacggcaataccggcaatgtagtaggtaaataccgccagcggtaccggagccatctgcaatagggtatgcatttgctgcagatcgctattggtccgtgaaatcacctgtccggtacgcagcgcgtcctggcctgcgccatcgagcttttgaatactgtcgaacgctcgtcctcgcagggtgtgctgcacccacagcgatagctcgccagcatagccgcgtcgtacatagttaccgatgaaatcaaaaaaggcgatcagtagcagcccgcaggccagccacggcaggcgggtaggatttcccgccagcgcatcatttaccgcctgccgcgtcagtagcggcgtcagcgcggccagcagaatggtcgacaccgacgccaccaccacgatagcgctaagtttcttacgttcccagcacacgcgcgcaaggcggattatccaggactgcgcgggtgtgggagagtgagtcgcaggcattaagcctcctccgtcaatttaaagatgaaatccgccacggcggccattaccctttttgcgccatggcggccagttctttcgccacctcggttgggcaggcctgcgccgccatttccgccgccacctcttcagaggccttacgtaatgcgcgatcgtcgaggaaagcattgatcatactgctcgacagacctccctcgccggggatgatcccgcagccgcgatcgactaccgcgcgggcgtttactgggcgatcggccccctggccgaaaacgatctgtggaatacccgcgtgcagcgccgtcagggtgttgccagcgccgccgtgatggataaaaccatcggcgccgttgaggaaggcgcccatcgggatccagtcaaccaggcgaacgtttgacggcaacgagcgtaaatcggatcgcgcattggctgagagatgcagaatgatctcggcatcgacttcactggcggaatccatcacccaggagatcaaatcgaggccgtcgaccatcggtttgacggtgcccaggctgaccagtagccgtttgcgatcgggcgtgcgttcccaccattcttcccaaaccgcaccgccgttatacggcacgtattgcatgggaatgatcggttcgccatcgttttgcaggatgctcatactcggcggcgtcacgtcgatccacgccatatcctgcggcggagcttcgacgccgtggcggcggtaggcgtcagcgagcgagcgcgtcacgcctttgatatgccaggggtgtggccgaagccgacggtttgcatgaccaccgggatatcgtatttggcggcgatcagcggcccgacgacgccgaggggaggatagacgataagatcgggccgccagtgtccggcaaactccaccagttggtcggccatctcttcgctgaagaacgagaagttgcccattttggtgccgatgttactttccttccgcagcgcctcgcgacggcgataatcggcctccgaatcgaagccgggcgcggcatcaaacactaccagccctgcctcggccgcctttttggcgaatttaccgctactggcgataagcacttcgtgaccgttaacgcgaaatgcctgcgccaaagacagcaccgggtatagcagcccatagagtggcgggccaacaaacagaatacgcatgagaaaatccctctccgcttgacgaactaattcaggaagtcgacgcagtcaatatgccggccagaagggtgttaattgtcgtaacccggctgtgcctggcgctgcgccattttttagtttcgccagcgcgacgcacggcgccgccggcgaccctatcgcaggcggtgaatccgtagcgcacgctgacgaatcgggaattccctgtcccgacttccattaacgcttgcgcgtcattgtcctgatgaacggcctgacgcgccgccgcactgccacggcggcttgtgagaccgcatttgccgggtgagaggccggtcaacgcgctgggcgatgtccgtaattcctgaagacaccgtgtcgcatcaccctgatagcgtcgccttcgcgggtcggtaagggataaagcgccgttgttcaggcgatgctcgttcccttacggcctcggtataccttgccaaagaaatcaccaatgcaaatgctaatgagaataattaccaatatcatttgcaaattgcaatgataagtaaaaacttaatggaacgggtaaacgtttataagacaaatcgcaggtgagcttttcaggaggggcgatgggttccggtaagtgatgttgttctgcaggaacaaaggccaatcggttatttttttattgcggaaagcggctgcttaccgctcttcattacccgcgtatgatttgtgatatgatgaaaaagcgaaacttttctcttttttccaggttaaacgatacttatgagcgcgttcgatcactcgtcagatgacacccaggaaactatcggcaacagcctgcgccgacgcccactggcgcgcaaaaagttgtctgaaatggtggaagaagagttggagcagatgattcgtcgcggcgagtttggcgaaggtggacagcttccttcggaacgtgagctgatggcgttttttaacgtcgggcgcccgtcggtacgtgaagcgctggctgcgctcaagcgtaagggcctggtgcaaatcaacaatggcgaacgtgcgcgagtctcgagaccgtcggcggacaccatcatttccgagctttccgggctggcgaaggattttctctccgcgcctggcggtatcgcgcatttcgagcagttacgcctttttttcgaatcaagcctggtgcgctatgcggctgagaacgccacggatgagcagatttccctgttaagcaaggcgctggagattaacggccagtcgctggatgataacgcgcaatttattcgctcagacgtcgatttccaccgcgtgctggcggagatccccggcaaccctatctttatggcgacgcatgttgctttgcttgactggctaatcgccgcgcggccgaaagtgtcggagcaagagcttcatcatcacaataacgtcagttttcaagagcatattgccatatttaacgccatacgcgatcgcgatccggacgaagccgatcgtgcgttgcaaacccacctcaaaagtgtttccgccacctggcgtgccttaggtaaatccaaaaaatccgctaaatgatccctgcctcgcgatcggtttagtgaactcgatcgcacaataagctttccctattgtactgctttaaaaatgatctggtataacaggtataaaggtacacagttaatccaatcaaacattattacgaggtatatatggttagccatttacgtggcgtgatgcccgcgcttctgaccccattcgacgcacagcagaacatcgatcgggcgagcctgcgtcggttagtacgtttcaatattaagcagggcgttgatggggtttacgtcggcggatcgaccggggaggccttcgttcagagcctttccgagcgcgaagaagtccttgaaatcgtagcggaagaggcgaaagggaaaattaccttaattgcgcatgttggttgcgtcagtacggcggaaagccagcagctggcggcggcggctaagcgctatggttttgatgcggtttccgcggtaacgccgttctactacccgttcagctttgaagagcactgcgatcattatcgcgcaattattgattctgctgatgggataccgatggtggtctacaacattccggcgctgagtggggtaaaactgaccttagagcagattaaccaactggtgacattaccgggggtgggcgcgttaaaacaaacgtctggcgatctctatcaaatggagcaaatccgtcgcgcgcatccggaactggtgctctacaacggctatgacgaaattttcgcttccggcttgctggcgggcgctgacggcgggatcggtagtacctataacattatggcctggcgctatctggggatcgtgcaggcgctgaaagagggcgacaccgcgaaggcgcagcagctgcagcatgagtgtaataaggtcatcgatctgttagtcaaagtgggcgtattccgtggactgaaaacggtgctgcactatatggatgtgctctccgtaccactctgccgtaaaccgtttgcgccggtagaggataaattccaggccgaattgaaagcgctggcgcagcagttaatgcaggagcgcggctgatttctcgccggagacgctcataaactgcgctttcgatgagagatttaatcagacatctgaagcgggcgtcatccggcaacaacgatattcaattcataccaaagcgagtgggcgcagcccatcgcgggagactcaccatgagtacaacaacccagaacatcccgtggtatcgtcatcttaaccgggcgcagtggcgggcattttccgccgcctggttaggttatttgcttgatggttttgattttgtcttaatcgccctggtgctcactgaggttcaggggaattcggtttaacgacggtgcaggcggcaagcctgatttccgccgcttttatctctcgctggtttggcggcttgatgctcggggcaatgggggatcgctacggtcgacggctggcgatggtgaccagcattgttcttttttcgttgggtacgctggcctgcggttttgcccctggctacacctctctctttattgcccggctggttattgggatgggcatggcgggagaatatggctccagcgccacctatgttattgaaagttggccgaaacatttgcggaacaaggcgagtggatttctgatctctggcttctcggttggcgccgttgtcgccgcgcaggtttatagtctggtggtgcccgtttggggctggcgtgcgctctttttcatcggcattgtccccatcgtttttgcactctggctgcgtaaaaacattccggaagcggaagactggaaagagaagcacgaaggtaaagcgccggtacgtacgatggtcgatattctctatcgcggccagcatcgggtgctaaacatcatcatgacctttgtggccggcgcgtcgttatggtactgctttgccggcgaggcgcgtattgccgggttggttgcgctgctgggactggtatgcgccattatcttcatcagtttcatggtgcaaagcagcggtaaacgctggccaaccggcgtgatgttgatggtggtggtgctcttcgctttcctctactcctggccgattcaggcgctgctgcctacttatctgaaaactgaactggcctatgatccacatactgttgctaacgtattgttctttagcggctttggtgcagccgtcggctgctgcgtcggcggattcctcggcgactggctggggacccgtaaagcttacgtttgcagtttactggcttcgcaactgctgatcgttccggtatttgcgataggcggcaccaatgtttgggtgctcggtttgttacttttcttccagcaaatgctgggtcaaggaatttcagggatcttaccgaagctgatcggcggttatttcgaaaccgatcagcgtgctgcgggtctggggtttacttacaacgtcggtgctttgggcggcgcgttagcgccgattctcggggcgttaattgctcaacgtctggatttaggcaccgcgctgggttcgctctcctttagcctgacgttcgtggtgatcctacttatcgggcttgatatgccaacccgcgtccagcggtggatccgcccggaagccatgcgtacccatgatgcgatcgatggcaaacctttcagcggcgcagtgccgtttggtcgcggcaaaagcacactagcgaaaagtaaaaattaaccatggcgcccggccaatcacgaatgtttgcctaaggatatgatgatgtctctacttgaacagcttaatcaaaacattgcgcaatctggtggtttgatagtttcctgccagcctgtaccaaatagccctctggataagcctgaaattgtcgctgcgatggccctggcggcggagcaggcaggggcggtcgcgctgcgtattgagggcattgagaacttacgcgccacccgcgccgtcgtttctattcctatcatcgggattatgaaacgcgatctcgacgattcgccagtccggatcaccccgttccttgacgatgttgatgcgttggctcaaggcggggcggatattatcgccgtggacgggaccgatcgcctgcgtccggttaccgttgcggcactgctggcgcgaattcatcagcatgctttgctggcgatggccgactgttcaacttttgaagatgggatgacttgccagcagcaggggccgacattatcgggacgacgctttctggctacacgacggtgaaaacgccggaagaacccgatttcgctctggtgaaaacactcagcgaggccggatgccgggtgattgcggagggcgctacaacaccccagcgcaggcggcaactgcgatgcgccaggggcatgggccgtgaccgttggctctgccatcactcgtcttgagcatatctgccagtggtataactcggcgttaaaaaaggcggtgtcatgactacgcttgctattgatatcggcggaaccaaactcgccgccgcgctggtggatgatgacctgaacctccttaaacgccgtgagttgccgacacccgccagcaaaatgccggaagcgctatgttcggcgctgcaagagctgatcgtgccgttgtttgctcgcgcccagcgagtggcaattgcctctaccggaataattagcggcggcgtgctgtcggccatcaatccccacaatctgggcggtttgcagcattttccgctgacgcaaaccctggaaaaaatcaccggcctacccacactggcggttaacgatgcgcaagctgcggcatgggcggaataccatgctctggggatgaatgtcgcgacatggttttcatcacggtatccacaggtgtgggggcggtgtagtgagtaatggtcggctaatcaccgggatggcggtctcgccggccatctgggccatacgttagcggacccgaatggaccgctatgcggttgtggtcggcgcggctgcgtagaggctgttgcttccggacgtggaatggcggccgccgctcagggagaactcagcggatgtgatgcgaaaacgattttcatccgtgccgggcaggatgatgagcaggctattgggcttattcaccgttcggcacagaccttagcgagattgatcgctgatgtaaaagcgacaacggattgccagcgcgtggtggtcggtggcagcatcggcctggcggaaggttatctggagatggtgagagcttaccttgcgcaggaaccgtcggtatatcacgttatgttacaacccgcgcattaccgacatgacgcgggattgctgggagcggtgttactggctcgggagaataactcatgatagcaggtgatattggaacgctaaccgcctccgggatacatcccgttttagccgaagcgttgatgctggcggtagccgcttgtccacaggagaaatctcctggacgtttcaatctacgcggtgacgatatttttatgaacgtcatggtatttactacccagccagcggaaagtaaaaaatcggaacagcatgcgcaatatatcgatattcaactgttgctaagcggtgaagaacgtattctgtgggaatggtaaattgtgcacagcagtgcgaagcgatacacgttgaagaggattatcagttgtgtaatgcgattgaaaatcagcaggccattacgctacggcctggtaatttcgtgatatttatgcctggtgagccacataaacctggatgtattacgacattgccgcaggagattaaaaaagtagtcgtcaaggttaatgttagccttttgcaaaacgaatactgatgctgagattattcctggttttgtttgtgtaatgtgttcttcatttaaatctgcaaaatttaaactagcttattaggggctccttttcttaaaacatgcaatatagggactgttatggctattgatatgtatctgaaggttgatggggtaaccggtgaatctaacgactcaaatcataaaaattggatagatgttttgtcatttagctgggcggctgagcagcctgggaatatgagcgttggcggcggtggcggagcgggtaaagttaattttcaggacctttcggtacaagcattaatagataaagcaacgccggcagttctcaagttttgcgctagcggtaaacatgtcgctaaagtcgaactatcaatttgcaaagccggcggttcgcaaattgagtattcgcgtgttgtccttgaagatgttctggtgacgaaaaccagttttagcggtgtgggtcataccgacactattatggtgaattacctgtttcaggcatctaaagttaatctgcattattgggagcagtcttctcaagggaccaaaggtgcagaaactaaatcgggttgggatatcaaacagaataaagaaatttaatcgacgctggagcgcctgcaatgccagatattacctccgagataaatgcggttctctccgatcattcccggtttgacgcagagcagctggatattattatttcattcgtcaatgaactggataaaggaactttgagtcagtttgagaacgctccggatcgcacgattatggatacctatgagcgcttgctttctgccagtaaagagcctgccagaagacaacgcgacgaagaatacgaactggaatctctgacgggggccagtcgtcgtactaccaccatgagcaatcatgccgcgttttttgatcgcttcagaacaacgcccgcgcatatgtatggttacggcggcaacgtctaccgggatcagacaaaaagctattacgatgtggccggtaaaatactggcaggcattggcggtctcgcttcttttggcgcaggtaccgccgccatcgccgcctcgcaggcgggttcgtcgctttcgggtatagcggcgcgttatgcgttatcttctgtcggcgcgaccggcctggccgctggcgcgatggcgttgctccgtaataatttttccgatgttcaggtggcgacgaataaagatttcctcgaaaccatcaagtctatcgccaagctaagaaacaaactgaatgatttcttccagggcctcaacaacaaggtctattcggataagacaaaagcagaaacggcgctcaacaatgaaatgaagtcacatccgttacgttttggcgtcggttcaggaagtcaggtagtacatgcaaacctggccccgattcaacgtttggtcactcaggactttgttaccgtaaaccacgagatcagagccaaaattttgccgaagggtacaaattcagcctggagtgttgcggtttccagctcagaaatggggtgggatgaacgggtattggaccaggctaacatgggtattctgcagcaggtcgttcatcagctttaacgcggttgtgttggcggcgaataatcgaacgcagttcgatggagagtccgtttgcagaaaagcaaaaacccagccatagacttactgcttgtcagttaagcttttaaaggtagccgtaacgcgtagcgttgcggcttcttttttaccgctcgtggttcatacctcgccctgtgtgtcggcggcgcgaatttccctgccattgtcagttgtagttgccagacaatatcgaccacgtttttatagtaaaatggcttcagggtcggtgacgatcccggggatgtgttgttatcggaaacagaagaataggtattgttatattaaccaactcaatgcaaggaatcaaagtaacgcattgaattacaagttcttatataaaaataataattccggactgacgtattcatcgtttaataaaaattcatttaaatttttaaagatgtcttttaaatatacgggaaaatgttgtcgtctgtagtagtgtagcattatactctacagatggttattgctcttatatgttagggagagaatcgaatgtattcacataacagggataaagacaatttctaaattaaattccagcaactcaatcagattattactaaattgagagcgaaatattttttgtatggcgggtctgagttttactttgaaacgcagaggtttgttcagcaaattagtcgggatattaacagtaactgcctcacctgtaagggaggaacagcattaattgtgcatctgacagagaatttacaggaacaggactcactttttacctttgagaaagtaagcgaatattatattgtaaagaaagaacaaaaagacaggaatcttcatctcgtattagctcaggtaggttttgttgccggtggcacccaaatttttggaggcgctggtatttgttctgcaacgttaggtgccgcgtgtgctgcctacggggtaccaatgatgctgcatggtataaataatgcttatgaaaatggctattatcttttataccgtaaaagcaaatcaggcggtgtaagggacgcttaccgtattgctgcaaaaaaattaggatatggcaataaacaaggtgatttagcctacggtgcggttgatctttcattaactgcatatggttccttcaggcaaaccctgttgcccagggagaagtcatggagcctgttccggcatgtaaaagcagattatatccgagggtggcaggaggcaggaagaatacctctttctcttgacggattgagtagtgtgggtacagtctggcaattatatgaactgaagggaaactaaaaaatggattcaagcgtagttgttttacacgaatcaatatggcctatcatattttattatgtagtatctttacttattttcatttcattgtgttatggaaaagtaaaggtgactcaaaaaagaaaacgtttatactttgtgttgtattcattgtttgttattttctgtgcctctgtacagttcgctttatttagttacggaacaaaatttgctcaagcctttctgcatttgaatttagatgttgacctatatgattcaatatactgggggctttagcttacagtcttctatgtttaattgcactccccaaaaatatatatgttaaaccggcatagagagagtcaggggaacgaaaatactacggtgtaattccagaacggaataaaggctgactatggttgccattcagtccggtgaccaaagtgagtcagacattaaggtgggtcgtagaaaagcaaaaccaccataggttgggcccctgaataagtggtaccggacttgggattgatgtttaaagtgtggtggctttgttatgcgtggagttaggttcacatataacggtgtgaaaaacatacccacctcgcttgtagtaggttgatcagtcacccctgcattctccagcatattcagcacgtcaaacagatcgcgtggatgctgacggtcgagtgcggcacagattttaccgctgtaaagatccgccagcgagacgacatttctggtggtgaatccgtattctatttccacctgttcacataccggcatttctgttgctggcaacagcagcccacgccagacgagactaacttcaatctttatctgtgcgtcggcggtgttaacgatgatgcgtttttcatccactttgttctcctgccggatagcagtgatcccctgtctgccgttgagcgattcagtaatacgcatcaaggcgtcattgatggccgccagatcggtatcgcgatccgcataggccttatacgccagatcgatatctaccgacaggcgagggaaatcctgtacaaacaaattgattgcagtgccgcctttcagagcgaagcaagactcctttgccacatgtggcagcgcagccattaatagcctgacctgtcgggcataactatcacgcagatccatcttcgaccccttccgttttaaatgcgcggggaacggtgatttgataatccggctccagccagccgccgggaacgatttgccgcttccctgtacctgtttctataccgctttgatcgagataccgaaaataaggatgctcattgcgccgggcaagatagagcattacccggttggttttaaccgaatggctggcgcagagcagtgtctgtaatttacgtgggctgagaaggttcatcccctgaaacagggcatcggcatgttcgaatgagatcaatgcagaaacgccgctggcgatctcatacgcggccagttccgggacactacctattcagttaactcccgtgccgctccgcttaattgaacggtattggcctttttggcgggttctttaaatagtggtgcccggactcggactaacgccgcaggcgttgaacagcgcgcttgtcgcgctggccccgaaggggtgagccgcgttgcggcgaataatcgaacgcagctagatgaagagtccggccgcagaaaagcaaaaacccagccataggctgggttctctgaataagtggtgcccggactcggaatcgaaccaaggacacggggattttcaatcccctgctctaccgactgagctatccgggcaacggggcgcattaaacctgattcaccgcgcctcgtcaacgaaatttataaatttcgcagcagactgaacaatctatcaccactttgccgtaaaagcacgcgtcgtcaggcaaaaaaggccgtccacgcgaccgaaatcggcattgccagcagcagggcggggagcatattgaccaccgcgaacatcttaatcccgcaaatacgcaggccggtcgccaccagcagcataccgccgacggcgctgaagtcggccatcatcattggggtggtcagcggcatgataagtgaggcgcaggccgccagactcagctgaatcagcagcattggcaccgagattgccgacaccgccagccccagagtgcaggcgaaaatagtagcggtgaaaaagtcgagaaacgctttagcgataaggatgctggcgtcgccggtcattccttcgcgcatggcgccaaaaacgccggtaccgctggcgcaaaacagcacgatgattgccacgtagctctgaatatatgactcgtgggccgaggcctttttcctgccctttggcgacaatagttgctggagtttgcttaccagggtattgatgcctttctccatattacacacttcgccgagtagcgcgccgaccagcgtcgccagcaccatcaccggcagattggcgcacttgatgaccagtaaaataccaatccccagtgatgccagcccaaaaatcgaggtcatcgaggtgcggatccgttccggcaatcgttggctcagcagcgcgcccagtacgcagccgacaagcaccgcgctggcgttaataaatggccctataaccaaagtaaactcctgttaattattcctgatgtccgcattattatgacgttgtttcgccgctaaggcttacggatacgtggggagaatgcatatggatttcatcttgcgccactttcggaaaggtgccatgattgcgcggattttcacctctttaccctgaggccgccgggatgacgacatcgccattacatcgccgttgccgctgcgtactgctgcgcggtttgcctcgttccttactctccctgttcaccatgcggtgaaggccacgtatgctcactgtaggacaacagtaagatcggacgcgtctgcttttactgatgtccggcggtcggagctgaattccgtcagacccggacacctcgttgggcaaggctccacctttgcctgagatttttacactcccgatacgggcatttgcgcttatgaaatctatgcacattgccgccagctgtgagctggtctcccgtctgtccacccatcgccaggttgtggcgctggacagtactgattttaccgatgcggcagcggtcgtcatcaccgcggcggatagccgcagcggtatcctggccctgctcaagcgcagcggattcaatctgccggtctatctatttagcgaaacgcaaacggataaaccggaaggagtcgtcgcggtgattagcggtaaagagcaggagtggctggagctggaagcggccgcctgcggctatgaagagaaactgttgccgccatttttcaatacgcttagccagtacgttgagatggacaacagcactttcgcctgtcccggccatcagcatggcgcgttctttaaaaagcatcccgcgggccgccagttctacgagtttttcggcgagaacgtttttcgcgccgacatgtgcaacgccgacgtcaagttgggcgatctgctgatccatgaaggttcggcgaagcacgcgcagaaatttgcggcaaaagtcttcaatgccgataaaacctatttcgtgcttaacggcacttccgcggcgaacaaggtcgtgaccaatgcgctgctaacccgcggcgatttagtactgttcgatcgcaacaaccataaatcaaaccaccatggcgcgctgatccaggctggggcgacgccggtctatctggaagccgcgcgcaacccgttcggctttatcggcggcatcgacgaccactgctttgatgaaacctacctgcgcgagctgatccgcgaagcggcgccggaaaaagccgacgcgccacgcccgttccgcctggcggtgatccaactgggcacctatgacggcacggtgtataacgcgcgccaggtggtcgataaaatcggccatctctgcgattacattctgtttgactcggcgtgggtcggttacgagcagtttatcccgatgatggctgactgctcaccgctgctgttggatctcaatgaaaacgatccgggcatttttgtgacgcaatcggtgcataagcagcaggccggtttttcgcagacctcgcaaattcacaagaaggataaccatctgcgcggccaggcgcgtttctgcccgcataagcggctgaataacgcctttatgctgcatgcttccaccagtccgttttatccgctgttcgcctcgctcgatgtgaatgccaaaatccacgaaggagagagcggtcggcggctgtgggcggagtgcgtggagctgggtatcgaagcgcgtaaagcgatactggcgcagtgtaaattattgcggccatttgtgccgccgctggtcggcgggaaaccgtggcaggaacattcgacggcaactatcgccagcgaacgtcgcttctttagcttcgagccgggcgcgagctggcacggctttagcggttatgctgacaatcaatactttgtcgatccgtgtaagctgctgctgaccacgccgggcatcgatgccgatagcggagactataccgagtttggcatcccggcgaccatcctggcgcactacctgcgcgaaaacggcatcgtgccggagaagtgcgatctcaactcgattttgttcctgctgacgccggcggaaagcgcggaaaaactggcgcgactggtggcgatgctggcccagttcgaacagcatatcgaagcggattcgccgctcgccgaggtactgccgactattttcaacaaatacccggttcgctaccgcgattacaccattcgccagctgtgtcaagaaatgcacgatctgtacgtcagttttgatgttaaagacctgcaaaaggcgatgttccgcaagcagagtttcccgccggtggtgatgaacccgcaggacgccaaccgtgaatttatccgcggtaacgttgagctggtgcgcctgagcgaggccgaaggccgtatcgcggcggaaggggcgctaccgtatccgccgggcgtgctgtgcgtggtgccgggcgaactctggggtggcgcggtgctgcgctacttcctcgcgctggaagagggggtcaatatgctgccgggcttttcgccggagctgcaggggtttatagcgaaacggataccgatggtattaagcggctgtatgggtatgtgctgaagaaataaaaaaaacgccccgctgaacaggcggggcgttttgcttttgccaatcaggcgttctggcgcgcggcggcaggctgtctgacgtgttgatacttgaacagcgccacgaaagcgacggccagcaccagcgagtaggcggcgaaaatcagccacacgctttgccagttagtgatcccctcaacggtaaagtgctcgacaactttgccgctcaccatcccaccaaggatacagccgaagccgttggtcatcatcaggaacattccctgggcgctggcgcggatttccggacgcacctctttctcaacgaatactgaaccggagatgttgaagaaatcgaaggcgcagccgtagacgatcatcgacagtaccagcagcacggtaccgaacggcgtcgggtcgccgaaggcgaacaggccgaagcgcagcatccacgccacgatactaatcagcatcacgttcttaatgccgtagcggctaaggaagaacgggatggtcaggataaacagcgtttcggagatctgcgaaatcgacatcaataccgacgcgtgctcgacgataaagctgccggagaacagcgggtctttatcgaagctgtgcaggaaagtgttgccaaacatattagtgatttgcagttcggcgccgagcatcatggagaagataaagaagattgccatacgcttgtttttaaacagcgcaaaagcgttcaggccgagcatctcggtccagctctggttgcgctgggcgttggcgaccggaatatgcggcagcgtcagggtgaacagcgccagcaagaccgacagcgtcgcgccgatataaagctgcatatggctaagctcgaagcccgagaagctgacgccccacatggcgaggataaagccgatggtgccccagatacgaattggcgggaaatcggtcacgatatccagccccgccgactgcaggcggtagtaagagatggtgttgatcaagccaagcgtcggcatataggccagcgagttaagcaagatcacgaggaacatctcgcctggcgtagtgacctgcgccgcgaggtacagcgttaacgcgccgaccaggtggcagatggcatacaccc
